(19) United States
(12) Patent Application Publication
(10) Pub. No.: US 2014/0227311 A1
(43) Pub. Date: Aug. 14, 2014

(54) Method for Removing Immunosuppressive Properties of HIV Envelope Glycoproteins

(71) Applicants: Shervin Bahrami, Aarhus C (DK); Mogens Ryttergaard Duch, Risskov (DK)

(72) Inventors: Shervin Bahrami, Aarhus C (DK); Mogens Ryttergaard Duch, Risskov (DK)

(73) Assignee: SKAU APS, Aarhus N (DK)

(21) Appl. No.: 14/239,961

(22) PCT Filed: Aug. 15, 2012
(86) PCT No.: PCT/DK2012/050297

§ 371 Date: Feb. 20, 2014

(30) Foreign Application Priority Data
Aug. 23, 2011 (DK) PA 2011 70463

(51) Int. Cl. C07K 14/005; C07K 7/08

(52) U.S. Cl. CPC C07K 14/005; C07K 7/08; C12N 2770/00034
USPC 424/188.1; 530/395; 530/326; 530/324

(57) ABSTRACT

The present invention concerns a method for removal of immunosuppressive effects of envelope glycoproteins derived from human immunodeficiency virus, such as for vaccination purposes and for generation of neutralizing antibodies to HIV. The invention further concerns vaccines and antibodies obtainable by the method, as well as the use of such vaccines and antibodies.

[0001] The present invention relates to removal of immunosuppressive effects of envelope glycoproteins derived from human immunodeficiency virus for vaccination purposes and for generation of neutralizing antibodies to HIV.

### Technical Background

[0002] There are two major types of HIV; HIV-1 and HIV-2 that infect humans. SIV is a virus very similar to HIV which infects monkeys and has been found in African monkeys. They all belong to a group of retroviridae known as Lentiviruses. Retroviruses transfer their genes from a producer cell to a target cell as a genomic RNA transcript, which is reverse-transcribed after infection and integrated into the DNA genome of the target cell.

[0003] The first person with a documented HIV-infection died in 1959. In the early 1980s doctors in the US become aware that more and more patients suffered from abnormal infections and showed signs of immune failure. The syndrome was named Acquired Immune Deficiency Syndrome (AIDS) and it was soon after discovered that HIV was the causative agent for the observed destruction of the immune system.

[0004] Only attenuated (that is live but weakened) HIV-strains has been able to provide immunity in primate studies even though they will never reach a required safety profile suitable for mass vaccination. The replication process for HIV-1 has an error rate of about one per 10,000 base pairs. Since the entire viral genome is just under 10,000 base pairs, it is estimated that on average one error is introduced into the HIV-1 genome at each viral replication cycle. This high mutation rate contributes to extensive variability of the viruses inside anyone person and an even wider variability across populations. This variability has resulted in different HIV-1 variants being described, where these subspecies of virus are called “clades.” The distinctions are based on the structure of the envelope proteins, which are especially variable. The M (for major) variant is by far the most prevalent worldwide. Within the M variant are clades A, B, C, D, E, F, G H, I, J and K, with clades A through E representing the vast majority of infections globally. Clades A, C and D are dominant in Africa, while clade B is the most prevalent in Europe, North and South America and Southeast Asia. Clades E and C are dominant in Asia. These clades differ by as much as 35%. Another variant is Clade 0, which is observed in Cameroun isolates of HIV-1. The greatest variation in structure is seen in the envelope proteins gpl20 and gp41. There are two important results from the very high mutation rate of HIV-1 that have profound consequences for the epidemic. First, the high mutation rate is one of the mechanisms that allow the virus to escape from control by drug therapies. These new viruses represent resistant strains. The high mutation rate also allows the virus to escape the patient's immune system by altering the structures that are recognized by immune components. An added consequence of this extensive variability is that the virus can also escape from control by vaccines.

### SUMMARY OF THE INVENTION

[0005] Envelope glycoproteins derived from HIV with reduced immunosuppressive properties are antigens, which may have one or more of the following uses:

I) Providing a strong and persistent CD8⁺ T-cell response against HIV-virus glycoprotein in vivo
II) Generating neutralizing antibodies against HIV-virus in vivo
III) Providing an optimal antigen for vaccination against HIV
IV) Use as an antigen for generation of neutralizing antibodies against HIV

[0006] The strategy is based upon eliminating the inherent immunosuppressive properties of the envelope glycoprotein of HIV without disrupting the overall conformation of the envelope. This will be accomplished by rational introduction of specific amino acids changes into the HIV envelope glycoprotein.

[0007] The present invention relates to HIV-1 envelope polypeptides, to be used either as an antigen for HIV vaccination or as an antigen for generation of neutralizing antibodies against HIV. The invention also encompasses biological entities comprising such polypeptides or nucleic acids encoding those, in particular viral particles, viral like particles whether they are produced in vivo or in vitro, viral derived vector(s) or any eukaryotic expression vector(s). Moreover the invention relates to vaccine compositions, which comprise a polypeptide of the present invention and an adjuvant as well as a production method and kits comprising said vaccine compositions.

### General Disclosure

### Vaccination

[0008] Vaccination is the administration of antigenic material (a vaccine) to produce immunity to a disease.

### Mechanism of Function

[0009] Vaccinations involve the administration of one or more immunogens, which can be administered in several forms.

[0010] Some vaccines are administered after the patient already has contracted a disease. Vaccinia given after exposure to smallpox, within the first three days, is reported to attenuate the disease considerably, and vaccination up to a week after exposure likely offers some protection from disease or may modify the severity of disease. Other examples include experimental AIDS, cancer and Alzheimer's disease vaccines.

### Adjuvants and Preservatives

[0011] Vaccines typically contain one or more adjuvants, used to boost the immune response. Tetanus toxoid, for instance, is usually adsorbed onto alum. This presents the antigen in such a way as to produce a greater action than the simple aqueous tetanus toxoid.

[0012] Vaccines may further comprise preservatives, which are used to prevent contamination with bacteria or fungi. Preservatives may be used at various stages of production of vaccines.

### Types

[0013] All vaccinations work by presenting a foreign antigen to the immune system in order to evoke an immune response, but there are several ways to do this. The four main types that are currently in clinical use are as follows:
[0014] 1. An inactivated vaccine consists of virus particles which are grown in culture and then killed using a method such as heat or formaldehyde. The virus particles are destroyed and cannot replicate, but the virus capsid proteins are intact enough to be recognized and remembered by the immune system and evoke a response. When manufactured correctly, the vaccine is not infectious, but improper inactivation can result in intact and infectious particles. Since the properly produced vaccine does not reproduce, booster shots are required periodically to reinforce the immune response.
[0015] 2. In an attenuated vaccine, live virus particles with very low virulence are administered. They will reproduce, but very slowly. Since they do reproduce and continue to present antigen beyond the initial vaccination, boosters are required less often. These vaccines are produced by passaging virus in cell cultures, in animals, or at suboptimal temperatures, allowing selection of less virulent strains, or by mutagenesis or targeted deletions in genes required for virulence. There is a small risk of reversion to virulence, this risk is smaller in vaccines with deletions. Attenuated vaccines also cannot be used by immune-compromised individuals.
[0016] 3. Virus-like particle vaccines consist of viral protein(s) derived from the structural proteins of a virus. These proteins can self-assemble into particles that resemble the virus from which they were derived but lack viral nucleic acid, meaning that they are not infectious. Because of their highly repetitive, multivalent structure, virus-like particles are typically more immunogenic than subunit vaccines (described below). The human papillomavirus and Hepatitis B virus vaccines are two virus-like particle-based vaccines currently in clinical use.
[0017] 4. A subunit vaccine presents an antigen to the immune system without introducing viral particles, whole or otherwise. One method of production involves isolation of a specific protein from a virus or bacteria (such as a bacterial toxin) and administering this by itself. A weakness of this technique is that isolated proteins may have a different three-dimensional structure than the protein in its normal context, and will induce antibodies that may not recognize the infectious organism. In addition, subunit vaccines often elicit weaker antibody responses than the other classes of vaccines.
   A number of other vaccine strategies are under experimental investigation. These include DNA vaccination and recombinant viral vectors.

### Superiority of Virus Like Particles as Immunogens for Vaccination Purposes or for Generation of Neutralizing Anti Bodies

[0018] The development of a broad and neutralizing antibody response is vital for a protective HIV-1 vaccine. In addition, the induction of specific and effective cytotoxic T lymphocytes has been shown to be required for infection control. Thus, the developments of vaccine strategies that encompass both arms of the immune system are important. Differential MHC I and II antigen presentation is a key factor for initiation of a potent immune response. There appear to be short-comings in antigen presentation when antigens are administered solely as peptides or DNA. In contrast cross-talk between antigen presenting cells and T helper lymphocytes are promoted in vaccine strategies based on either infectious or non-infectious viral particles (virus like particles or VLPs). A potent induction of cell mediated immunity can be achieved even with whole-killed viral particles. This is likely a consequence of improved antigen uptake and systemic immunostimulation in macrophages and dendritic cells. Baculovirus-derived human immunodeficiency virus type i virus-like particle activate dendritic cels and induce ex vivo t-cell responses). To achieve potent immunogenic retroviral particles such as γ-retroviral particles or lentiviral like particles may be produced with HIV-1 envelope trimers on the surface. These particles can function as a superior immunogenic particle avoiding any risk associated with viral inactivation procedures. In a further development such VLPs can be produced by cells in the patient using appropriate vectors like but not restricted to vectors derived from vaccinia virus or measles virus

### Administration

[0019] A vaccine administration may be by any acceptable route, such as oral, by injection (intramuscular, intradermal, subcutaneous), by puncture, transdermal or intranasal.

### Vaccinia Virus (VACV or VV)

[0020] Poxviruses are unique among DNA virus because they replicate only in cytoplasm of the host cell, outside of the nucleus. Therefore, the large genome is required for encoding various enzymes and proteins involved in viral DNA replication and gene transcription. During its replication cycle, VV produces four infectious forms which differ in their outer membranes: intracellular mature virion (IMV), the intracellular enveloped virion (IEV), the cell-associated enveloped virion (CEV) and the extracellular enveloped virion (EEV). Although the issue remains contentious, the prevailing view is that the IMV consists of a single lipoprotein membrane, while the CEV and EEV are both surrounded by two membrane layers and the IEV has three envelopes. The IMV is the most abundant infectious form and is thought to be responsible for spread between hosts. On the other hand, the CEV is believed to play a role in cell-to-cell spread and the EEV is thought to be important for long range dissemination within the host organism.

### Common Strains

[0021] This is a list of some of the well-characterized vaccinia strains used in research and immunizations.
[0022] Western Reserve
[0023] Copenhagen
[0024] Dryvax (also known as “Wyeth”): the vaccine strain previously used in the United States, produced by Wyeth. It was replaced in 2008 by ACAM2000, produced by Acambis. It was produced as preparations of calf lymph which was freeze-dried and treated with antibiotics.
[0025] ACAM2000: The current strain in use in the USA, produced by Acambis. ACAM2000 was derived from a clone of a Dryvax virus by plaque purification. It is produced in cultures of Vero cells.
[0026] Modified vaccinia Ankara: a highly attenuated (not virulent) strain created by passaging vaccinia virus several hundred times in chicken embryo fibroblasts. Unlike some other vaccinia strains it does not make immunodeficient mice sick and therefore may be safer to use in humans who have weaker immune systems due to being very young, very old, having HIV/AIDS, etc.

[0027] Vaccinia viruses re-engineered to express foreign genes are robust vectors for production of recombinant proteins, the most common being a vaccine delivery system for antigens. Concerns about the safety of the vaccinia virus have been addressed by the development of vectors based on attenuated vaccinia viruses. One of them, the Modified Vaccinia Ankara (MVA) virus, is a highly attenuated strain of vaccinia virus that was developed towards the end of the campaign for the eradication of smallpox by Professor Anton Mayr in Germany. Produced by hundreds of passages of vaccinia virus in chicken cells, MVA has lost about 10% of the vaccinia genome and with it the ability to replicate efficiently in primate cells.

### Modified Vaccinia Ankara in Clinical Trials

[0028] MVA is widely considered as the vaccinia virus strain of choice for clinical investigation because of its high safety profile. MVA has been administered to numerous animal species including Monkeys, mice, swine, sheep, cattle, horses, and elephants, with no local or systemic adverse effects. Over 120,000 humans have been safely and successfully vaccinated against smallpox with MVA by intradermal, subcutaneous, or intramuscular injections.

### Challenge Studies in Primates

[0029] Immunization regimens incorporating priming with DNA vaccine and boosting with recombinant MVA-based vaccine have been found to provide some protection in non-human primates following challenge with an immunodeficiency virus. While vaccination did not prevent infection in these studies, it did result in lower viral load setpoints, increased CD4 counts, and reduced morbidity and mortality in vaccinated animals, compared to controls.

### Production of a Lentiviral VLPs by an MVA Vaccine in Vivo

[0030] A modified vaccinia virus Ankara (MVA) vaccine has been used in the SIV macaque therapeutic immunization model. MVA was selected as a vaccine vector, since it has previously shown to induce strong antiviral immune responses and protection. As viral antigens SIV Gag-Pol and Env were used.

### Neutralizing Antibody

[0031] A Neutralizing antibody, or NAb is an antibody which defends a cell from an antigen or infectious body by inhibiting or neutralizing any effect it has biologically. An example of a neutralizing antibody is diphtheria antitoxin, which can neutralize the biological effects of diphtheria toxin.

[0032] Most antibodies work by binding to an antigen, signaling to a white blood cell that this antigen has been targeted, after which the antigen is processed and consequently destroyed. The difference between neutralizing antibodies and binding antibodies is that neutralizing antibodies neutralize the biological effects of the antigen, while binding antibodies flag antigens.

[0033] This difference is what gives neutralizing antibodies the ability to fight viruses which attack the immune system, since they can neutralize function without a need for white blood cells (excluding production)

### Immunosuppressive Properties of Enveloped Viruses with Type I Fusion Proteins

[0034] Enveloped viruses enter their target cells by means of active fusion of their lipid membrane with that of the cells. The fusion is mediated by viral gene products in form of proteins embedded in the lipid membrane of the virus, the so-called viral fusion proteins [1].

[0035] At the same time fusion proteins of some enveloped viruses show an immune suppressive activity. Inactivated retroviruses are able to inhibit proliferation of immune cells upon stimulation [2-4]. Expression of these proteins is enough to enable allogenic cells to grow to a tumor in immune competent mice. In one study, introduction of ENV expressing construct into MCA205 murine tumor cells, which do not proliferate upon s.c. injection into an allogeneic host, or into CL8.1 murine tumor cells (which overexpress class I antigens and are rejected in a syngeneic host) resulted in tumor growth in both cases [5]. Such immunosuppressive domains have been found in a variety of different viruses with type 1 fusion mechanism such as Mason pfeizer monkey virus (MPMV), murine leukemia virus (MLV), lentiviruses such as HIV and in filoviruses such as Ebola and Marburg viruses [6-9].

[0036] The immune suppressive activity is located to a very well-defined structure within the class I fusion proteins. The immunosuppressive effects range from significant inhibition of lymphocyte proliferation [7,8], cytokine skewing (up regulating IL-10; down regulating TNF-α, IL-12, IFN-γ) [10] and inhibition of monocytic burst [11] to cytotoxic T cell killing [12]. Importantly, peptides spanning ISD are mostly active in these assays when either linked as dimers or coupled to a carrier (i.e. >monomeric). Such peptides derived from such immune suppressive domains are able to reduce or abolish immune responses such as cytokine secretion or proliferation of T-cells upon stimulation.

### Co-Location of the Immunosuppression Domain and the Fusion Domain

[0037] The immunosuppressive domain of retro-, lenti- and filoviruses overlap a structurally important part of the fusion subunits of the envelope proteins. Although the primary structure (sequence) of this part of the fusion proteins can vary greatly from virus to virus, the secondary structure, which is very well preserved among different virus families, is that of an alpha helix that bends in different ways during the fusion process This structure plays a crucial role during events that result in fusion of viral and cellular membranes. It is evident that the immunosuppressive domains of the class I fusion proteins overlap with a very important protein structure needed for the fusion proteins mechanistic function.

[0038] The energy needed for mediating the fusion of viral and cellular membranes is stored in the fusion proteins, which are thus found in a meta-stable conformation on the viral surface. Once the energy is released to drive the fusion event, the protein will find its most energetically stable conformation. In this regard fusion proteins can be compared with loaded springs that are ready to be sprung. This high energy conformation makes the viral fusion proteins very susceptible to modifications; Small changes in the primary structure of the protein often result in the protein to be folded in its stable post fusion conformation. The two conformations present very different tertiary structures of the same protein.

[0039] This presents a significant challenge if one wishes to remove the immunosuppressive effect without altering the tertiary structure of the fusion protein, but it has been shown in the case of simple retroviruses that small structural changes in the envelope protein are sufficient to remove the immune suppressive effect without changing structure and hence the antigenic profile, resulting in an antigen which is significantly more potent as a vaccine.

[0040] The non-immune suppressive envelopes are much better antigens for vaccination. The proteins can induce a 30-fold enhancement of anti-env antibody titers when used for vaccination [6]. Furthermore, viruses that contain the non-immunosuppressive form of the friend murine leukemia virus envelope protein, although fully infectious in irradiated immunocompromised mice cannot establish an infection in immunocompetent animals. Interestingly in the latter group the non-immunosuppressive viruses induce higher cellular and humoral immune responses, which fully protect the animals from subsequent challenge by wild type viruses [13]

### Further General Description of the Invention

[0041] The present invention provides a new approach to designing immunogenic HIV-1 envelope polypeptides derived from HIV-1 envelope protein, GP41 and/or GP120 and/or GP160 for vaccination purposes and/or for generation of neutralizing antibodies to HIV. Specific amino acid residues are mutated to repress the immunosuppression displayed by GP41 thereby boosting the immune response against HIV-1. Mutation of those specific residues however, must not completely destroy the overall protein structure of the viral envelope protein as e.g. measured functionally by fusion assays. The polypeptides of the present invention can be inserted in a suitable construct and expressed in an organism to produce a vaccine or an immunogenic response against HIV.

[0042] According to an aspect, the present invention concerns a method for making an HIV-1 envelope glycoprotein, which may be expressed on the surface of cells, virus or virus like particles, and which provides reduced immune suppression, allowing said HIV-1 envelope glycoprotein to generate an enhanced immune response as compared to wildtype; said method comprising the steps of:
[0043] Selecting at least one HIV envelope glycoprotein among the group consisting of GP41 and GP160;
[0044] Modifying the immunosuppressive domain of said envelope glycoprotein, said immunosuppressive domain being localizable by the sequence:

L₁X₂X₃X₄X₅X₆X₇X₈X₉X₁₀X₁₁X₁₂X₁₃X₁₄X₁₅X₁₆X₁₇X₁₈X₁₉X₂₀X₂₁G₂₂C₂₃X₂₄
X₂₅X₂₆X₂₇X₂₈C₂₉

[0045] Where X is any amino acid residue;
[0046] Said modifying step comprising mutating or genetically modifying at least one of the amino acids selected among the amino acids X₂-X₁₇, whereby said sequence allows maintaining the ability of expression of said HIV-1 envelope glycoprotein on the surface of cells or virus, and further provides reduced immune suppression of said HIV-1 envelope glycoprotein, and wherein said amino acids after said modifying step are selected among:

X2: Q, R, N, A, G
X3: A, T, V, G, Q, R
X4: R, K, G, A, Q
X5: V, I, L, M, A, G, Q, R
X6: L, A, C, D, E, F, G, H, I, K, M, N, P, Q, R, S, T, V, W, Y
X7: A, T, S, G, Q, R
X8: V, I, L, Q, M, A, G, Q, R
X9: E, K, A, G, Q, R
X10: R, S, T, K, G, N, E, D, A, G, Q
X11: L, A, C, D, E, F, G, H, I, K, M, N, P, Q, R, S, T, V, W, Y
X12: L, V, I, M, R, A, G, Q
X13: K, Q, R, A, E, G, S, H, W, T, V
X14: D, E, N, H, G, A, G, Q, R
X15: Q, R, A, G
X16: Q, A, S, K, T, R, H, G
X17: L, M, S, Q, R, H, I, V, F, A, G

[0047] Said modifying step is not necessarily limited to modifying at least one of the amino acids selected among the amino acids X₂-X₁₇. As an example, even one, two, three or all of the amino acids L₁, G₂₂, C₂₃ and/or C₂₉ may be modified, as long as the obtained sequence allows maintaining the ability of expression of said HIV-1 envelope glycoprotein on the surface of cells or virus, and further provides reduced immune suppression of the obtained HIV-1 envelope glycoprotein. It is preferred that the amino acids L₁, G₂₂, C₂₃ and C₂₉ are not modified.

[0048] The term “localizable” is used to express that the relevant domain can be localized using the indicated sequence.

[0049] According to another aspect, the invention concerns an HIV-1 envelope glycoprotein obtainable according to the invention

[0050] According to an aspect, the invention concerns an antigen obtainable by selecting a part of an HIV-1 envelope glycoprotein, which HIV-1 envelope glycoprotein is obtainable according to the invention, said part comprising the modified domain of said envelope glycoprotein.

[0051] The expression “a part” in this context refers to any part.

[0052] According to an aspect, the invention concerns a nucleic acid sequence, preferably recombinant, encoding an HIV-1 envelope glycoprotein, an HIV-1 envelope polypeptide or an antigen according to the invention.

[0053] According to an aspect, the invention concerns an isolated eukaryotic expression vector comprising a nucleic acid sequence according to the invention

[0054] According to an aspect, the invention concerns a vaccine composition for HIV, comprising an HIV-1 envelope glycoprotein according to the invention.

[0055] According to an aspect, the invention concerns a method for producing an antibody, said method comprising the steps of:
[0056] Administering an entity selected among an HIV-1 envelope glycoprotein, an HIV-1 envelope polypeptide, an antigen, a nucleic acid sequence or a vector according to the invention to a host, such as an animal; and
[0057] Obtaining the antibody from said host.

[0058] According to an aspect, the invention concerns an antibody obtainable according to invention.

[0059] According to an aspect, the invention concerns neutralizing antibodies obtained or identified by the use of at least one HIV-1 envelope glycoprotein according to the invention.

[0060] According to an aspect, the invention concerns a method for manufacturing neutralizing antibodies comprising the use of at least one HIV-1 glycoprotein according to the invention.

[0061] According to an aspect, the invention concerns a method for manufacturing humanized neutralizing antibodies, comprising the use of at least one sequence selected among the sequences 1 to 336.

[0062] According to an aspect, the invention concerns a vaccine composition, comprising an entity selected among the group consisting of an HIV-1 envelope glycoprotein, an HIV-1 envelope polypeptide, an antigen, a nucleic acid sequence, a vector and an antibody according to the invention, and in addition at least one excipient, carrier or diluents.

[0063] According to an aspect, the invention concerns a method for producing a vaccine composition according to the invention comprising combining at least one HIV-1 envelope glycoprotein, an HIV-1 envelope polypeptide, an antigen, a nucleic acid sequence, a vector or an antibody according to the invention, preferably in purified form, with at least one adjuvant

[0064] According to an aspect, the invention concerns a pharmaceutical composition comprising an HIV-1 envelope glycoprotein, an HIV-1 envelope polypeptide, an antigen, a nucleic acid sequence, a vector, an antibody or a vaccine composition according to the invention, and at least one pharmaceutically acceptable excipient.

[0065] According to an aspect, the invention concerns a use of an HIV-1 envelope glycoprotein or an HIV-1 envelope polypeptide, or a dimerized version or a trimerized version or a multimerized version of the purified envelope polypeptide according to the invention as an antigen.

[0066] According to an aspect, the invention concerns a use of an HIV-1 envelope glycoprotein, an HIV-1 envelope polypeptide, an antigen, a nucleic acid sequence, a vector or an antibody according to the invention, for a medical purpose, such as for the treatment, amelioration or prevention of a clinical condition, such as for the manufacture of a medicament for the treatment, amelioration or prevention of a clinical condition, such as HIV.

[0067] According to an aspect, the invention concerns a method of treating or ameliorating the symptoms of an individual infected with HIV, or prophylactic treating an individual against HIV infection, comprising administering an amount of HIV-1 envelope glycoprotein, HIV-1 envelope polypeptide, antigen, nucleic acid sequence, vector or vaccine composition according to the invention.

[0068] In one aspect, the present invention relates to an HIV-1 envelope polypeptide which encompasses a region of 29 amino acids further comprising the mutated immunosuppressive domain rendering said immunosuppressive domain non-immunosuppressive where the amino acids at position 1, 22, 23 and 29 are invariable with the amino acid at position 1 being a Leucine, the amino acid at position 22 a Glycine, the amino acids at position 23 a Cysteine and the amino acid at position 29 a Cysteine. As such the HIV envelope antigen for making an HIV vaccine or generating neutralizing antibodies against HIV should contain the following sequence

<seqid 1;PRT;>:
L₁X₂X₃X₄X₅X₆X₇X₈X₉X₁₀X₁₁X₁₂X₁₃X₁₄X₁₅X₁₆X₁₇X₁₈X₁₉X₂₀X₂₁G₂₂C₂₃X₂₄
X₂₅X₂₆X₂₇X₂₈C₂₉

Where X is any amino acid residue.

### DETAILED DISCLOSURE

[0069] In a preferred embodiment the antigen should encompass a sequence where the amino acids has been even more restricted to

<seqid 2;PRT;>:
L₁X₂X₃X₄X₅X₆X₇X₈X₉X₁₀X₁₁X₁₂X₁₃X₁₄X₁₅X₁₆X₁₇X₁₈X₁₉X₂₀X₂₁G₂₂C₂₃X₂₄X₂₅X₂₆X₂₇X₂₈C₂₉
where
X is
X1: L
X2: Q, R, N, A, G
X3: A, T, V, G, Q, R
X4: R, K, G, A, Q
X5: V, I, L, M, A, G, Q, R
X6: L, A, C, D, E, F, G, H, I, K, M, N, P, Q, R, S, T, V, W, Y
X7: A, T, S, G, Q, R
X8: V, I, L, Q, M, A, G, Q, R
X9: E, K, A, G, Q, R
X10: R, S, T, K, G, N, E, D, A, G, Q
X11: L, A, C, D, E, F, G, H, I, K, M, N, P, Q, R, S, T, V, W, Y
X12: L, V, I, M, R, A, G, Q
X13: K, Q, R, A, E, G, S, H, W, T, V
X14: D, E, N, H, G, A, G, Q, R
X15: Q, R, A, G
X16: Q, A, S, K, T, R, H, G
X17: L, M, S, Q, R, H, I, V, F, A
X18: L, M
X19: G, N, S, A, Q, R
X20: I, L, S, A, T, E, V, M, F
X21: W, F
X22: G
X23: C
X24: S, K, T, Q, R, A
X25: G, F, D, N, W
X26: K, N, R, F, M, Q, A, S
X27: L, H, P, A, Q, S, T, W, I, V, F, R
X28: I, V, T
X29: C

[0070] In yet a preferred embodiment the antigen should encompass a sequence where the amino acids has been even further restricted to

<seq id 3; PRT;>:
L₁X₂X₃X₄X₅X₆X₇X₈X₉X₁₀X₁₁X₁₂X₁₃X₁₄X₁₅X₁₆X₁₇X₁₈X₁₉X₂₀X₂₁G₂₂C₂₃X₂₄X₂₅X₂₆X₂₇X₂₈C₂₉
where
X is
X1: L
X2: Q, R, A, G, Q
X3: A, T, G, Q, R
X4: R, K, G, A, G, Q
X5: V, I, L, A, G, Q, R
X6: L, A, C, D, E, F, G, H, I, K, M, N, P, Q, R, S, T, V, W, Y
X7: A, S, T, G, Q, R
X8: V, I, L, M, A, G, Q, R
X9: E, K, A, G, Q, R
X10: R, S, T, K, G, A, Q
X11: L, A, C, D, E, F, G, H, I, K, M, N, P, Q, R, S, T, V, W, Y
X12: L, V, I, M, A, G, Q, R
X13: K, Q, R, A, E, G, S, H, W, T, V, G
X14: D, N, G, A, Q, R
X15: Q, R, A, G
X16: Q, K, T, R, H, A, G
X17: L, R, I, F, G, Q
X18: L, M
X19: G, N, S, R
X20: I, L, S, A, T, E, V, M, F
X21: W
X22: G
X23: C
X24: S, K, T, R, A
X25: G
X26: K, N, R
X27: L, H, P, A, Q, S, T, W, I, V, F, R
X28: I, V
X29: C

[0071] In an even more preferred embodiment the antigen should encompass a sequence where the amino acids has even been further restricted to

<seqid 4;PRT;>:
L₁X₂X₃X₄X₅X₆X₇X₈X₉X₁₀X₁₁X₁₂X₁₃X₁₄X₁₅X₁₆X₁₇X₁₈X₁₉X₂₀X₂₁G₂₂C₂₃X₂₄X₂₅X₂₆X₂₇X₂₈C₂₉
where
X is
X1: L
X2: Q, R, A, G
X3: A, T, G, Q, R
X4: R, K, A, G, Q
X5: V, I, L, A, G, Q, R
X6: L, A, C, D, E, F, G, H, I, K, M, N, P, Q, R, S, T, V, W, Y
X7: A, S, T, A, G, Q, R
X8: V, I, L, A, G, Q, R
X9: E, K, A, G, Q, R
X10: R, S, T, K, G, A, Q
X11: L, A, C, D, E, F, G, H, I, K, M, N, P, Q, R, S, T, V, W, Y
X12: L, V, I, M, A, G, Q, R
X13: K, Q, R, A, E, G, S, H, W, T, V, A, G
X14: D, N, A, G, Q, R
X15: Q, R, A, G
X16: Q, K, T, R, A, G
X17: L, R, I, F, A, G, Q
X18: L
X19: G, N, S, R
X20: I, L, S, V, F
X21: W
X22: G
X23: C
X24: S, K, T, A
X25: G
X26: K, R
X27: L, H, P, A, Q, S, T, W, I, V, F, R
X28: I, V
X29: C

[0072] Particularly preferred sequences are sequences selected among sequences with seqID 5 to seqID 228.

[0073] Examples of HIV envelopes suited as antigens for HIV vaccination or for generating neutralizing antibodies against HIV are given but not restricted to seqid 229-366. These sequences represent different HIV clades or combinations thereof, which an HIV vaccine must be effective against.

[0074] Another aspect relates to a method of treating, preventing or ameliorating a clinical condition, said method comprising administering to an individual suffering from said clinical condition an effective amount of an HIV-1 envelope polypeptide or part thereof as defined in the present invention, an antigen as defined in the present invention, a nucleic acid as defined in the present invention, a vector as defined in the present invention, a biological entity as defined in the present invention, a vaccine composition as defined in the present invention, or a kit-of-parts as defined in the present invention.

### Terms

[0075] HIV-1 envelope proteins are produced as a polyprotein (gp160) which is cleaved into its two subunits gp120 and gp41. Examples of such HIV envelopes is exemplified by but not restricted to SEQ ID NO: 229-366. Mutations can be introduced into the HIV envelope polyprotein (gp160) rendering it resistant to cleavage into its two subunits (gp120 and gp41). Such HIV envelope mutants are considered bona fide envelope antigens suited for introduction of further mutations rendering them non-immunosuppressive.

[0076] HIV: As used herein, the term “HIV” refers to all forms, subtypes and variations of the HIV virus, and is synonymous with the older terms for HIV, such as HTLV III and LAV. Various cell lines capable of propagating HIV or permanently infected with the HIV virus have been developed and deposited with the ATCC, including HuT 78 cells and the HuT 78 derivative H9, as well as those having accession numbers CCl 214, TIB 161, CRL 1552 and CRL 8543, which are described in U.S. Pat. No. 4,725,669 and Gallo, Scientific 3 0 American 256:46 (1987).

[0077] Vaccination modality: A vaccination modality is defined as any step or usage of the immunogen described in this application for any vaccination purpose or part thereof.

[0078] Partial knock out of the immunosuppressive domain: Is defined as at least a 30% reduction of the immunosuppression elicited in the CTLL-2 assay by an dimerized mutant peptide as defined in SEQid 1 as compared to a wildtype dimerized peptide as defined in Segid 369.

[0079] According to an embodiment, the inventions concerns a method for making an HIV-1 envelope glycoprotein, which may be expressed on the surface of cells, virus or virus like particles, and which provides reduced immune suppression, allowing said HIV-1 envelope glycoprotein to generate an enhanced immune response as compared to wildtype; said method comprising the steps of:
[0080] Selecting at least one HIV envelope glycoprotein among the group consisting of GP41 and GP160;
[0081] Modifying the immunosuppressive domain of said envelope glycoprotein, said immunosuppressive domain being localizable by the sequence:

L₁X₂X₃X₄X₅X₆X₇X₈X₉X₁₀X₁₁X₁₂X₁₃X₁₄X₁₅X₁₆X₁₇X₁₈X₁₉X₂₀X₂₁G₂₂C₂₃X₂₄X₂₅X₂₆X₂₇X₂₈C₂₉

[0082] Where X is any amino acid residue;
[0083] Said modifying step comprising mutating or genetically modifying at least one of the amino acids selected among the amino acids X₂-X₁₇, whereby said sequence allows maintaining the ability of expression of said HIV-1 envelope glycoprotein on the surface of cells or virus, and further provides reduced immune suppression of said HIV-1 envelope glycoprotein, and wherein said amino acids after said modifying step are selected among:

X2: Q, R, N, A, G
X3: A, T, V, G, Q, R
X4: R, K, G, A, Q
X5: V, I, L, M, A, G, Q, R
X6: L, A, C, D, E, F, G, H, I, K, M, N, P, Q, R, S, T, V, W, Y
X7: A, T, S, G, Q, R
X8: V, I, L, Q, M, A, G, Q, R
X9: E, K, A, G, Q, R
X10: R, S, T, K, G, N, E, D, A, G, Q
X11: L, A, C, D, E, F, G, H, I, K, M, N, P, Q, R, S, T, V, W, Y
X12: L, V, I, M, R, A, G, Q
X13: K, Q, R, A, E, G, S, H, W, T, V
X14: D, E, N, H, G, A, G, Q, R
X15: Q, R, A, G
X16: Q, A, S, K, T, R, H, G
X17: L, M, S, Q, R, H, I, V, F, A, G

[0084] According to an embodiment, the inventions concerns a method for making an HIV-1 envelope glycoprotein, which may be expressed on the surface of cells or virus, and which provides reduced immune suppression, allowing said HIV-1 envelope glycoprotein to generate an enhanced immune response as compared to wildtype; said method comprising the steps of:
[0085] Selecting at least one HIV envelope glycoprotein among the group consisting of GP41 and GP160;
[0086] Modifying the immunosuppressive domain of said envelope glycoprotein, said immunosuppressive domain being localizable by the sequence:

L₁X₂X₃X₄X₅X₆X₇X₈X₉X₁₀X₁₁X₁₂X₁₃X₁₄X₁₅X₁₆X₁₇X₁₈X₁₉X₂₀X₂₁G₂₂C₂₃X₂₄X₂₅X₂₆X₂₇X₂₈C₂₉

[0087] Said modifying step comprising mutating or genetically modifying at least one of the amino acids selected among the amino acids X₂-X₁₇ into any amino acid, whereby said sequence allow maintaining the ability to expression on the surface of cells or virus, and further provides reduced immune suppression of said HIV-1 envelope glycoprotein.

[0088] According to an embodiment, the inventions concerns a method according to the invention, for making an HIV-1 envelope glycoprotein for medical use, such as therapeutic or prophylactic purpose, preferably for use as a vaccine.

[0089] According to an embodiment, the invention concerns a method, for making an HIV-1 envelope glycoprotein for vaccination purposes or for the generation of neutralizing antibodies.

[0090] According to an embodiment, the invention concerns a method, wherein said modifying step does not provide a sequence selected among a wild type sequence having immune suppressing properties.

[0091] According to an embodiment, the invention concerns a method, wherein said modifying step does not provide a sequence selected among the sequences:

X2: Q, R
X3: A, T
X4: R
X5: V, I, L
X6: L
X7: A
X8: V, I, L, M
X9: E
X10: R, S, T, K, G
X11: Y, L, F
X12: L, I, V
X13: K, Q, R, G, S
X14: D, N
X15: Q
X16: Q, K, R
X17: L, I, F

[0092] According to an embodiment, the invention concerns a method, wherein said modifying step does not provide a sequence selected among the sequences:

X2: Q, R
X3: A, T
X4: R
X5: V, I, L
X6: L
X7: A
X8: V, I, L, M
X9: E
X10: R, S, T, K
X11: Y, L, F
X12: L, I
X13: K, Q, R, G
X14: D, N
X15: Q
X16: Q, K, R
X17: L, F

[0093] According to an embodiment, the invention concerns a method, wherein the HIV-1 envelope glycoprotein may be expressed on the surface of virus, as said sequence provides the ability of expression on the virus to said HIV-1 envelope glycoprotein.

[0094] According to an embodiment, the invention concerns a method, wherein the HIV-1 envelope glycoprotein exhibits fusiogenic activity, as said sequence further provides fusiogenic activity to said HIV-1 envelope glycoprotein.

[0095] The method according to any of the previous claims, wherein said modifying step provides a sequence selected among:

X2: Q, R, N, A, G
X3: A, T, V, G, Q, R
X4: R, K, G, A, Q
X5: V, I, L, M, A, G, Q, R
X6: L, A, C, D, E, F, G, H, I, K, M, N, P, Q, R, S, T, V, W, Y
X7: A, T, S, G, Q, R
X8: V, I, L, Q, M, A, G, Q, R
X9: E, K, A, G, Q, R
X10: R, S, T, K, G, N, E, D, A, G, Q
X11: L, A, C, D, E, F, G, H, I, K, M, N, P, Q, R, S, T, V, W, Y
X12: L, V, I, M, R, A, G, Q
X13: K, Q, R, A, E, G, S, H, W, T, V
X14: D, E, N, H, G, A, G, Q, R
X15: Q, R, A, G
X16: Q, A, S, K, T, R, H, G
X17: L, M, S, Q, R, H, I, V, F, A, G

[0096] The method according to claim 10, wherein said modifying step provides a sequence selected among:

X2: Q, R, A, G,
X3: A, T, G, Q, R
X4: R, K, G, A, G, Q
X5: V, I, L, A, G, Q, R
X6: L, A, C, D, E, F, G, H, I, K, M, N, P, Q, R, S, T, V, W, Y
X7: A, S, T, G, Q, R
X8: V, I, L, M, A, G, Q, R
X9: E, K, A, G, Q, R
X10: R, S, T, K, G, A, Q
X11: L, A, C, D, E, F, G, H, I, K, M, N, P, Q, R, S, T, V, W, Y
X12: L, V, I, M, A, G, Q, R
X13: K, Q, R, A, E, G, S, H, W, T, V, G
X14: D, N, G, A, Q, R
X15: Q, R, A, G
X16: Q, K, T, R, H, A, G
X17: L, R, I, F, G, Q, A

[0097] The method according to claim 11, wherein said modifying step provides a sequence selected among:

X2: Q, R, A, G
X3: A, T, G, Q, R
X4: R, K, A, G, Q
X5: V, I, L, A, G, Q, R
X6: L, A, C, D, E, F, G, H, I, K, M, N, P, Q, R, S, T, V, W, Y
X7: A, S, T, A, G, Q, R
X8: V, I, L, A, G, Q, R
X9: E, K, A, G, Q, R
X10: R, S, T, K, G, A, Q
X11: L, A, C, D, E, F, G, H, I, K, M, N, P, Q, R, S, T, V, W, Y
X12: L, V, I, M, A, G, Q, R
X13: K, Q, R, A, E, G, S, H, W, T, V, A, G
X14: D,N, A, G, Q, R
X15: Q, R, A, G
X16: Q, K, T, R, A, G
X17: L, R, I, F, A, G, Q

[0098] According to an embodiment, the invention concerns a method, wherein the first 17 amino acids of said sequence is modified into a sequence selected among:

LQARX₅X₆AVERX₁₁LKDQQL,

wherein:
[0099] X₆ and X₁₁ independently are selected among any amino acids, and X₅ is selected among:

X5: V, I, L, M, A, G, Q, R

[0100] According to an embodiment, the invention concerns a method, wherein the first 17 amino acids of said sequence is modified into a sequence selected among:

LQAR X₅X₆AVERX₁₁LKDQQL

and further harbors 1 or 2 or 3 point mutations selected among any amino acids.

[0101] According to an embodiment, the invention concerns a method, wherein the first 17 amino acids of said sequence is modified into a sequence selected among:

LQAR X₅X₆AVERX₁₁LKDQQL

and further harbors 1 or 2 point mutations selected among:

X2: R, N, A, G
X3: T, V, G, Q, R
X4: K, G, A, Q
X5: V, L, M, A, G, Q, R
X7: T, S, G, Q, R
X8: I, L, Q, M, A, G, Q, R
X9: K, A, G, Q, R
X10: S, T, K, G, N, E, D, A, A, G, Q
X12: V, I, M, R, A, G, Q
X13: Q, R, A, E, G, S, H, W, T, V
X14: E, N, H, G, A, G, Q, R
X15: R, A, G
X16: A, S, K, T, R, H, G
X17: M, S, Q, R, H, I, V, F, A

[0102] According to an embodiment, the invention concerns a method, wherein the first 17 amino acids of said sequence is modified into a sequence selected among:

LQARX₅X₆AVERX₁₁LKDQQL,

more preferred among

LQARIX₆AVERX₁₁LKDQQL and
LQARVX₆AVERX₁₁LKDQQL.

[0103] According to an embodiment, the invention concerns a method, wherein the first 17 amino acids of said sequence is modified into a sequence selected among:

LQARILAVERGLKDQQL and
LQARIQAVERYLKDQQL.

[0104] According to an embodiment, the invention concerns a method according to any of the claims 10 to 17, wherein the first 17 amino acids furthermore harbors 1 or 2 or 3 point mutation(s) in said modified sequence.

[0105] According to an embodiment, the invention concerns a method, wherein X₆ is Q.

[0106] According to an embodiment, the invention concerns a method, wherein X₁₁ is G.

[0107] According to an embodiment, the invention concerns a method, wherein the reduced immune suppression is as measured by a technique selected among the group consisting of CTLL2 and PBMC proliferation inhibition assays.

[0108] According to an embodiment, the invention concerns a method, wherein the immune suppression after the modifying step is at least 25% reduced, more preferred at least 40% reduced, compared to before the modifying step.

[0109] According to an embodiment, the invention concerns a method, wherein the fusiogenic activity, as measured by a technique for measuring cell-cell fusion, preferably is selected among the group consisting of counting syncytia by light microscopy, resonance energy transfer based assays, and indirect reporter gene using techniques or by measuring infectious titers; alternatively, or in addition, the presence of fusiogenic activity may be indicated by the presence of at least one cell expressing the modified envelope and one cell expressing the receptor and/or coreceptors of HIV being fused together.

[0110] According to an embodiment, the invention concerns an HIV-1 envelope glycoprotein obtainable according to the invention.

[0111] According to an embodiment, the invention concerns an HIV-1 envelope polypeptide, preferably obtained from an HIV-1 envelope glycoprotein according to the preceding claim, consisting of a sequence:

L1X₂X₃X₄X₅X₆X₇X₈X₉X₁₀X₁₁X₁₂X₁₃X₁₄X₁₅X₁₆X₁₇
wherein X is:
X2: Q, R, N, A, G
X3: A, T, V, G, Q, R
X4: R, K, G, A, Q
X5: V, I, L, M, A, G, Q, R
X6: L, A, C, D, E, F, G, H, I, K, M, N, P, Q, R, S, T, V, W, Y
X7: A, T, S, G, Q, R
X8: V, I, L, Q, M, A, G, Q, R
X9: E, K, A, G, Q, R
X10: R, S, T, K, G, N, E, D, A, A, G, Q
X11: L, A, C, D, E, F, G, H, I, K, M, N, P, Q, R, S, T, V, W, Y
X12: L, V, I, M, R, A, G, Q
X13: K, Q, R, A, E, G, S, H, W, T, V
X14: D, E, N, H, G, A, G, Q, R
X15: Q, R, A, G
X16: Q, A, S, K, T, R, H, G
X17: L, M, S, Q, R, H, I, V, F, A

[0112] Subject to the proviso that said sequence allows an HIV-1 envelope glycoprotein to generate an enhanced immune response upon inclusion of said sequence in the immunosuppressive domain of said HIV-1 envelope glycoprotein.

[0113] According to an embodiment, the invention concerns an HIV-1 envelope polypeptide consisting of the modified domain of the HIV-1 envelope glycoprotein according to the invention.

[0114] The expression “the modified domain” will be used to refer to the formerly immunosuppressive domain which provides reduced immune suppression after the modifying step.

[0115] According to an embodiment, the invention concerns an antigen obtainable by selecting a part of an HIV-1 envelope glycoprotein, which HIV-1 envelope glycoprotein is obtainable according to the invention, said part comprising the modified domain of said envelope glycoprotein.

[0116] According to an embodiment, the invention concerns an antigen comprising the modified domain of an HIV-1 envelope glycoprotein, which HIV-1 envelope glycoprotein is obtainable according to the invention.

[0117] According to an embodiment, the invention concerns an antigen comprising a sequence:

L1X₂X₃X₄X₅X₆X₇X₈X₉X₁₀X₁₁X₁₂X₁₃X₁₄X₁₅X₁₆X₁₇
wherein X is:
X2: Q, R, N, A, G
X3: A, T, V, G, Q, R
X4: R, K, G, A, Q
X5: V, I, L, M, A, G, Q, R
X6: L, A, C, D, E, F, G, H, I, K, M, N, P, Q, R, S, T, V, W, Y
X7: A, T, S, G, Q, R
X8: V, I, L, Q, M, A, G, Q, R
X9: E, K, A, G, Q, R
X10: R, S, T, K, G, N, E, D, A, A, G, Q
X11: L, A, C, D, E, F, G, H, I, K, M, N, P, Q, R, S, T, V, W, Y
X12: L, V, I, M, R, A, G, Q
X13: K, Q, R, A, E, G, S, H, W, T, V
X14: D, E, N, H, G, A, G, Q, R
X15: Q, R, A, G
X16: Q, A, S, K, T, R, H, G
X17: L, M, S, Q, R, H, I, V, F, A

[0118] Subject to the proviso that said sequence provides the ability of said antigen to be expressed on the surface of cells or virus, and provides reduced immune suppression to said antigen.

[0119] According to an embodiment, the invention concerns an antigen, obtainable using a modifying step comprising modifying with a sequence selected among the sequences Seqid 1 to 228.

[0120] According to an embodiment, the invention concerns an antigen furthermore harboring 1 or 2 or 3 or 4 or 5 or 6 or 7 or 8 or 9 or 10 or 11 point mutation(s) in any of the sequences 1 to 228.

[0121] According to an embodiment, the invention concerns an antigen, which mediates binding of virus to cells expressing CD4.

[0122] According to an embodiment, the invention concerns an antigen, which mediates fusion of virus to host cells.

[0123] According to an embodiment, the invention concerns an antigen, which invokes an immune response which causes generation of neutralizing antibodies against HIV.

[0124] According to an embodiment, the invention concerns an antigen, wherein said immune response comprises a T-cell response against HIV.

[0125] According to an embodiment, the invention concerns an antigen, comprising a sequence of an HIV glycoprotein selected among Seqids 229 to 366, or which is at least 70, preferably at least 80, more preferred at least 90, preferably at least 95 percent, more preferred 99 percent identical to a sequence selected among Seqids 229-366.

[0126] According to an embodiment, the invention concerns an antigen according to the invention, which is recombinant or obtained by recombinant technology.

[0127] According to an embodiment, the invention concerns a nucleic acid sequence, preferably recombinant, encoding an HIV-1 envelope glycoprotein, an HIV-1 envelope polypeptide or an antigen according to the invention.

[0128] According to an embodiment, the invention concerns an isolated eukaryotic expression vector comprising a nucleic acid sequence according to the invention.

[0129] According to an embodiment, the invention concerns a vector according to the invention, which is a virus vector, preferably a virus selected among the group consisting of vaccinia virus, measles virus, retroviridae, lentivirus and adeno virus.

[0130] According to an embodiment, the invention concerns a vaccine composition for HIV comprising an HIV-1 envelope glycoprotein according to the invention.

[0131] According to an embodiment, the invention concerns a vaccine composition for HIV according to the invention comprising a virus like particle (VLP).

[0132] According to an embodiment, the invention concerns a vaccine composition for HIV according to the invention wherein the virus like particle is obtained using expression vectors for retroviral gag proteins, and optionally pol proteins, combined with an HIV envelope glycoprotein according to the invention.

[0133] According to an embodiment, the invention concerns a vaccine composition for HIV according to the invention wherein the virus like particle is obtained using expression vectors for gamma retrovial gag proteins, and optionally pol proteins, combined with an HIV envelope glycoprotein according to the invention.

[0134] According to an embodiment, the invention concerns a vaccine composition for HIV according to the invention wherein the virus like particle is obtained using expression vectors for lentiviral gag proteins, and optionally pol proteins, combined with an HIV envelope glycoprotein according to the invention.

[0135] According to an embodiment, the invention concerns a vaccine composition for HIV according to the invention wherein the virus like particle is obtained by the usage of expression vectors for HIV derived gag and pol proteins combined with an HIV envelope glycoprotein according to the invention.

[0136] According to an embodiment, the invention concerns a vaccine composition for HIV according to the invention, wherein at least one of the group consisting of gag, gag-pol or said HIV envelope glycoprotein, alone or in combination, has been codon optimized.

[0137] According to an embodiment, the invention concerns a vaccine composition for HIV according to the invention, wherein the virus like particle is produced ex vivo in a cell culture.

[0138] According to an embodiment, the invention concerns a vaccine composition for HIV according to the invention, wherein the virus like particle is partly or completely assembled ex vivo.

[0139] According to an embodiment, the invention concerns a vaccine composition for HIV according to the invention, wherein the virus like particle is generated in vivo in the patient by infection, transfection and/or electroporation by expression vectors.

[0140] According to an embodiment, the invention concerns a vaccine composition for HIV according to the invention, comprising a vector derived from a measles virus.

[0141] According to an embodiment, the invention concerns a vaccine composition for HIV according to the invention, comprising a vector derived from vaccinia virus.

[0142] According to an embodiment, the invention concerns a vaccine composition for HIV according to the invention, comprising an MVA vector.

[0143] According to an embodiment, the invention concerns a vaccine composition for HIV according to the invention, comprising an MVA-BN vector.

[0144] According to an embodiment, the invention concerns a vaccine composition for HIV according to the invention, comprising a purified glycoprotein.

[0145] According to an embodiment, the invention concerns a vaccine composition for HIV according to the invention, comprising an expression vector for DNA vaccination.

[0146] According to an embodiment, the invention concerns a method for producing an antibody, said method comprising the steps of:
[0147] Administering an entity selected among an HIV-1 envelope glycoprotein, an HIV-1 envelope polypeptide, an antigen, a nucleic acid sequence or a vector according to the invention to a host, such as an animal; and
[0148] Obtaining the antibody from said host.

[0149] According to an embodiment, the invention concerns an antibody obtainable according to the invention.

[0150] According to an embodiment, the invention concerns an antibody, which is specific for an entity selected among an HIV-1 envelope glycoprotein, an HIV-1 envelope polypeptide, an antigen, a nucleic acid sequence or a vector according to the invention.

[0151] According to an embodiment, the invention concerns a neutralizing antibodies obtained or identified by the use of at least one HIV-1 envelope glycoprotein according to the invention.

[0152] According to an embodiment, the invention concerns a method for manufacturing neutralizing antibodies comprising the use of at least one HIV-1 glycoprotein according to the invention.

[0153] According to an embodiment, the invention concerns a method for manufacturing humanized neutralizing antibodies, comprising the use of at least one sequence selected among the sequences 1 to 336.

[0154] According to an embodiment, the invention concerns a vaccine composition comprising an entity selected among the group consisting of an HIV-1 envelope glycoprotein, an HIV-1 envelope polypeptide, an antigen, a nucleic acid sequence, a vector and an antibody according to the invention, and in addition at least one excipient, carrier or diluent.

[0155] According to an embodiment, the invention concerns a vaccine composition according to the invention, further comprising an at least one adjuvant.

[0156] According to an embodiment, the invention concerns a vaccine composition according to the invention, wherein a Glade of HIV have been employed in the production of a number of HIV-1 envelope glycoproteins, HIV-1 envelope polypeptides, antigens, nucleic acid sequences, vectors or antibodies according to the invention, which is comprised in said vaccine, said Glade being selected among the clades A, B, C, D, E, and O, preferably B.

[0157] According to an embodiment, the invention concerns a vaccine composition according to the invention, wherein a plurality of clades of HIV have been employed in the production of a number of HIV-1 envelope glycoproteins, HIV-1 envelope polypeptides, antigens, nucleic acid sequences, vectors or antibodies according to the invention, which is comprised in said vaccine.

[0158] According to an embodiment, the invention concerns a vaccine composition according to the invention, wherein a plurality of clades of HIV, said clades being selected among A, B, C, D, E and O, have been employed in the production of a number of HIV-1 envelope glycoproteins, HIV-1 envelope polypeptides, antigens, nucleic acid sequences, vectors or antibodies according to the invention, which is comprised in said vaccine.

[0159] According to an embodiment, the invention concerns a vaccine composition according to the invention, wherein at least one of each of the HIV clades A, C and D, have been employed in the production of a number of HIV-1 envelope glycoproteins, HIV-1 envelope polypeptides, antigens, nucleic acid sequences, vectors or antibodies according to the invention, which is comprised in said vaccine.

[0160] According to an embodiment, the invention concerns a vaccine composition according to the invention, wherein at least one of each of the HIV clades C and E, have been employed in the production of a number of HIV-1 envelope glycoproteins, HIV-1 envelope polypeptides, antigens, nucleic acid sequences, vectors or antibodies according to the invention, which is comprised in said vaccine.

[0161] According to an embodiment, the invention concerns a vaccine composition according to the invention, wherein at least one of each of the HIV clades A, B, C, D, E and O, have been employed in the production of a number of HIV-1 envelope glycoproteins, HIV-1 envelope polypeptides, antigens, nucleic acid sequences, vectors or antibodies according to the invention, which is comprised in said vaccine.

[0162] According to an embodiment, the invention concerns a method for producing a vaccine composition according to the invention comprising combining at least one HIV-1 envelope glycoprotein, an HIV-1 envelope polypeptide, an antigen, a nucleic acid sequence, a vector or an antibody according to the invention, preferably in purified form, with at least one adjuvant.

[0163] According to an embodiment, the invention concerns a pharmaceutical composition comprising an HIV-1 envelope glycoprotein, an HIV-1 envelope polypeptide, an antigen, a nucleic acid sequence, a vector, an antibody or a vaccine composition according to the invention, and at least one pharmaceutically acceptable excipient.

[0164] According to an embodiment, the invention concerns a use of an HIV-1 envelope glycoprotein or an HIV-1 envelope polypeptide, or a dimerized version or a trimerized version or a multimerized version of the purified envelope polypeptide according to the invention as an antigen.

[0165] According to an embodiment, the invention concerns a use of an HIV-1 envelope glycoprotein, an HIV-1 envelope polypeptide, an antigen, a nucleic acid sequence, a vector or an antibody according to the invention, for a medical purpose, such as for the treatment, amelioration or prevention of a clinical condition, such as for the manufacture of a medicament for the treatment, amelioration or prevention of a clinical condition, such as HIV.

[0166] According to an embodiment, the invention concerns a method of treating or ameliorating the symptoms of an individual infected with HIV, or prophylactic treating an individual against HIV infection, comprising administering an amount of HIV-1 envelope glycoprotein, HIV-1 envelope polypeptide, antigen, nucleic acid sequence, vector or vaccine composition according to the invention.

[0167] A main aspect and embodiment of the present invention is to provide HIV-1 envelope polypeptide, or part thereof, to be used either as an antigen for HIV vaccination or as an antigen for generation of neutralizing antibodies against HIV. The invention also encompasses biological entities comprising such polypeptides or nucleic acids encoding those, especially viral particles or viral like particles, in particular retroviral, retroviral like, lentiviral or lentiviral like particles. Moreover the invention relates to vaccine compositions, which comprise a polypeptide of the present invention and an adjuvant as well as production methods and kits comprising said vaccine compositions.

[0168] Due to the high error rate during replication of the HIV-1 genome, the genetic code for HIV-1 envelope is highly variable, both inside anyone person and even more so across populations. The present invention relates to any variant of the HIV-1 envelope polypeptide, in particular any variant in which gp41, comprise an amino acid sequence encompassing a region of 29 amino acids further comprising the mutated immunosuppressive domain rendering said immunosuppressive domain non-immunosuppressive where furthermore the amino acids at position 1, 22, 23 and 29 are invariable with the amino acid at position 1 always being an L, the amino acid at position 22 an G, the amino acids at position 23 an C and the amino acid at position 29 a C. As such the HIV envelope antigen for making an HIV vaccine or generating neutralizing antibodies against HIV should encompass the following sequence:

Segid 1: L₁X₂X₃X₄X₅X₆X₇X₈X₉X₁₀X₁₁X₁₂X₁₃X₁₄X₁₅X₁₆X₁₇X₁₈X₁₉X₂₀X₂₁G₂₂C₂₃X₂₄X₂₅X₂₆X₂₇X₂₈C₂₉

[0169] In a further preferred embodiment the antigen should encompass a sequence where the amino acids has been even more restricted to

Segid 2: L₁X₂X₃X₄X₅X₆X₇X₈X₉X₁₀X₁₁X₁₂X₁₃X₁₄X₁₅X₁₆X₁₇X₁₈X₁₉X₂₀X₂₁G₂₂C₂₃X₂₄X₂₅X₂₆X₂₇X₂₈C₂₉ where X is
X1: L
X2: Q, R, N, A, G
X3: A, T, V, G, Q, R
X4: R, K, G, A, Q
X5: V, I, L, M, A, G, Q, R
X6: L, A, C, D, E, F, G, H, I, K, M, N, P, Q, R, S, T, V, W, Y
X7: A, T, S, G, Q, R
X8: V, I, L, Q, M, A, G, Q, R
X9: E, K, A, G, Q, R
X10: R, S, T, K, G, N, E, D, A, A, G, Q
X11: L, A, C, D, E, F, G, H, I, K, M, N, P, Q, R, S, T, V, W, Y
X12: L, V, I, M, R, A, G, Q
X13: K, Q, R, A, E, G, S, H, W, T, V
X14: D, E, N, H, G, A, G, Q, R
X15: Q, R, A, G
X16: Q, A, S, K, T, R, H, G
X17: L, M, S, Q, R, H, I, V, F, A
X18: L, M
X19: G, N, S, A, Q, R
X20: I, L, S, A, T, E, V, M, F
X21: W, F
X22: G
X23: C
X24: S, K, T, Q, R, A
X25: G, F, D, N, W
X26: K, N, R, F, M, Q, A, S
X27: L, H, P, A, Q, S, T, W, I, V, F, R
X28: I, V, T
X29: C

[0170] In yet another preferred embodiment the antigen should encompass a sequence where the aminoacids has been even further restricted to:

Segid 3: L₁X₂X₃X₄X₅X₆X₇X₈X₉X₁₀X₁₁X₁₂X₁₃X₁₄X₁₅X₁₆X₁₇X₁₈X₁₉X₂₀X₂₁G₂₂C₂₃X₂₄X₂₅X₂₆X₂₇X₂₈C₂₉ where X is
X1: L
X2: Q, R, A, G, Q
X3: A, T, G, Q, R
X4: R, K, G, A, G, Q
X5: V, I, L, A, G, Q, R
X6: L, A, C, D, E, F, G, H, I, K, M, N, P, Q, R, S, T, V, W, Y
X7: A, S, T, G, Q, R
X8: V, I, L, M, A, G, Q, R
X9: E, K, A, G, Q, R
X10: R, S, T, K, G, A, Q
X11: L, A, C, D, E, F, G, H, I, K, M, N, P, Q, R, S, T, V, W, Y
X12: L, V, I, M, A, G, Q, R
X13: K, Q, R, A, E, G, S, H, W, T, V, G
X14: D, N, G, A, Q, R
X15: Q, R, A, G
X16: Q, K, T, R, H, A, G
X17: L, R, I, F, G, Q
X18: L, M
X19: G, N, S, R
X20: I, L, S, A, T, E, V, M, F
X21: W
X22: G
X23: C
X24: S, K, T, R, A
X25: G
X26: K, N, R
X27: L, H, P, A, Q, S, T, W, I, V, F, R
X28: I, V
X29: C

[0171] In a yet more preferred embodiment the antigen should encompass a sequence where the amino acids has even been further restricted to:

Segid 4: L₁X₂X₃X₄X₅X₆X₇X₈X₉X₁₀X₁₁X₁₂X₁₃X₁₄X₁₅X₁₆X₁₇X₁₈X₁₉X₂₀X₂₁G₂₂C₂₃X₂₄X₂₅X₂₆X₂₇X₂₈C₂₉ where X is
X1: L
X2: Q, R, A, G
X3: A, T, G, Q, R
X4: R, K, A, G, Q
X5: V, I, L, A, G, Q, R
X6: L, A, C, D, E, F, G, H, I, K, M, N, P, Q, R, S, T, V, W, Y
X7: A, S, T, A, G, Q, R
X8: V, I, L, A, G, Q, R
X9: E, K, A, G, Q, R
X10: R, S, T, K, G, A, Q
X11: L, A, C, D, E, F, G, H, I, K, M, N, P, Q, R, S, T, V, W, Y
X12: L, V, I, M, A, G, Q, R
X13: K, Q, R, A, E, G, S, H, W, T, V, A, G
X14: D, N, A, G, Q, R
X15: Q, R, A, G
X16: Q, K, T, R, A, G
X17: L, R, I, F, A, G, Q
X18: L
X19: G, N, S, R
X20: I, L, S, V, F
X21: W
X22: G
X23: C
X24: S, K, T, A
X25: G
X26: K, R
X27: L, H, P, A, Q, S, T, W, I, V, F, R
X28: I, V
X29: C

[0172] In other embodiments of the present invention the HIV-1 envelope polypeptide or a fragment thereof as defined by seqid nr 229 to 366 has a sequence that is for example at least 40%, such as at least 45%, for example at least 50%, such as at least 55%, for example at least 60%, such as at least 65%, for example at least 67%, such as at least 70%, for example at least 72%, such as at least 75%, for example at least 77%, such as at least 80%, for example at least 81%, such as at least 82%, for example at least 83%, such as at least 84%, for example at least 85%, such as at least 86%, for example at least 87%, such as at least 88%, for example at least 89%, such as at least 90%, for example at least 91%, such as at least 92%, for example at least 93%, such as at least 94%, for example at least 95%, such as at least 96%, for example at least 97%, such as at least 98%, for example at least 99% identical to the amino acid sequence of any polypeptide of the present invention.

[0173] According to an embodiment, the following sequence is not part of the invention.

<seqid367; PRT;>
L₁X₂X₃X₄X₅X₆X₇X₈X₉X₁₀X₁₁X₁₂X₁₃X₁₄X₁₅X₁₆X₁₇X₁₈X₁₉X₂₀X₂₁G₂₂C₂₃X₂₄X₂₅X₂₆X₂₇X₂₈C₂₉
Where
X2: Q, R
X3: A, T
X4: R
X5: V, I, L
X6: L
X7: A
X8: V, I, L, M
X9: E
X10: R, S, T, K, G
X11: Y, L, F
X12: L, I, V
X13: K, Q, R, G, S
X14: D, N
X15: Q
X16: Q, K, R
X17: L, I, F
<seqid368; PRT;>
L₁X₂X₃X₄X₅X₆X₇X₈X₉X₁₀X₁₁X₁₂X₁₃X₁₄X₁₅X₁₆X₁₇X₁₈X₁₉X₂₀X₂₁G₂₂C₂₃X₂₄X₂₅X₂₆X₂₇X₂₈C₂₉
Where
X2: Q, R
X3: A, T
X4: R
X5: V, I, L
X6: L
X7: A
X8: V, I, L, M
X9: E
X10: R, S, T, K
X11: Y, L, F
X12: L, I
X13: K, Q, R, G
X14: D, N
X15: Q
X16: Q, K, R
X17: L, F
<seqid369; PRT;>
LQARVLAVERYLKDQQLLGIWGC

### Antigen

[0174] One aspect of the present invention relates to an antigen, which comprises a peptide derived from an HIV-1 envelope polypeptide of the present invention. In particular, the antigen incorporates a part of HIV-1 envelope polypeptide, including any region of gp41 and/or gp120 and/or gp160, such as for example the transmembrane domain (TM-domain) or the surface subunit (SU). Preferably, the antigen comprises at least one peptide with an amino acid sequence of an HIV-1 envelope polypeptide of the present invention, or a functional homolog thereof having at least 70%, such as at least 80%, for example at least 90% identity to said envelope.

### The Vaccine Composition

[0175] The vaccine composition of the invention is in one embodiment capable of eliciting a cellular immune response in the individual. For example, the vaccine composition is capable of eliciting the production in a vaccinated individual of effector T-cells having a cytotoxic effect against HIV-1 infected cells in a subject. In another embodiment, the vaccine composition is capable of eliciting the production in a vaccinated individual of regulatory T-cells having a cytotoxic effect against cells expressing HIV-1 envelope polypeptide or part thereof, and/or antigen presenting cells expressing HIV-1 envelope or part thereof. In another embodiment, the vaccine composition of the present invention is capable of mediating an antibody response in an individual and/or a biological entity.

[0176] In a particular embodiment the vaccine composition is to be given against infection with HIV, in particular HIV-1. The present invention therefore also pertains to a vaccine composition which is administered to an animal including a human being, in which the vaccine is capable of eliciting an immune response against a disease caused by a lentivirus, in particular HIV-1. Thus, a vaccine composition of the present invention is capable of eliciting a clinical response in a subject, wherein the clinical response is characterized by a reduced susceptibility, resistance, stabilization, remission or curing/recovery of an HIV infection and/or AIDS.

[0177] One embodiment combines anyone of the components of the present invention, including an HIV-1 envelope polypeptide, an antigen, a nucleic acid, an eukaryotic expression vector, and/or a biological entity of the present invention with at least one adjuvant or supplement to produce a vaccine composition.

[0178] Yet another embodiment combines any component of the present invention, such as an HIV-1 envelope polypeptide, a trimerized version of the HIV envelope, an antigen, a virus like particle, and/or a biological entity of the present invention with at least one adjuvant or supplement to produce a vaccine composition.

### Antibody

[0179] It is one aspect of the present invention to provide antibodies or functional equivalents thereof, such as antigen binding fragments or recombinant proteins specifically recognizing and binding an HIV-1 envelope polypeptide, such as an HIV envelope polypeptide encoded by a gene selected from the group consisting of SEQ ID NO: 229-366. In one embodiment, the antibody, antigen binding fragment, recombinant protein or functional homologue thereof is a neutralizing antibody capable of neutralizing HIV.

[0180] The antibodies according to the present invention may be a monoclonal antibody derived from a mammal or a synthetic antibody, such as a single chain antibody or hybrids comprising antibody fragments. Furthermore, the antibody may be mixtures of monoclonal antibodies or artificial polyclonal antibodies. In addition functional equivalents of antibodies may be antibody fragments, in particular epitope binding fragments. Furthermore, antibodies or functional equivalent thereof may be small molecule mimetics, mimicking an antibody.

[0181] Polyclonal antibodies is a mixture of antibody molecules recognizing a specific given antigen, hence polyclonal antibodies may recognize different epitopes within said antigen. In general polyclonal antibodies are purified from serum of a mammal, which previously has been immunized with the antigen.

[0182] The antibodies according to the present invention may also be recombinant antibodies. Recombinant antibodies are antibodies or fragments thereof or functional equivalents thereof produced using recombinant technology. For example recombinant antibodies may be produced using a synthetic library or by phage display.

[0183] Human monoclonal antibodies of the invention can be produced by a variety of techniques, including conventional monoclonal antibody methodology. Although somatic cell hybridization procedures are preferred, in principle, other techniques for producing monoclonal antibody can be employed, e.g., viral or oncogenic transformation of B-lymphocytes or phage display techniques using libraries of human antibody genes.

### Antibody Targets

[0184] In one embodiment of the present invention, the antibody, antigen binding fragment or recombinant protein thereof is capable of specifically recognizing and binding an HIV-1 envelope polypeptide, such as an HIV-1 envelope polypeptide selected from anyone of SEQ ID NO: 229-366

[0185] Importantly, the present invention encompasses use of an antibody as defined herein, for the manufacture of a medicament for the treatment of a clinical condition as defined herein, such as HIV-1 and/or AIDS. Also, the present invention encompasses methods of treatment of a clinical condition as defined herein, such as HIV-1 and/or AIDS comprising administration of an antibody as described herein to a person in need thereof. The invention also relates to an antibody as defined herein for treatment of said clinical condition. Thus, one aspect of the present invention relates to an antibody, antigen binding fragment or recombinant protein thereof, which is specific for an HIV-1 envelope polypeptide or part thereof as defined herein, and/or a nucleic acid as defined herein, and/or an antigen as defined herein, and/or a biological entity as defined herein. In one embodiment, the antibody, antigen binding fragment or recombinant protein thereof is capable of initiating an immune response against HIV-1 retroviral particles.

[0186] All cited references are incorporated by reference.

[0187] The accompanying Figure and Examples are provided to explain rather than limit the present invention. It will be clear to the person skilled in the art that aspects, embodiments and claims of the present invention may be combined.

### EXAMPLES

### Example 1

### Cells and Cell Based Assays for Immunosuppression

### Virus Preparation

[0188] Supernatant from virus producing cultures will either be purified by sucrose gradient centrifugation. The particles purified by sucrose gradient centrifugation will either be used directly, inactivated by UV treatment or disrupted by 0.6M KCL and 0.5% triton X100 and clarified by centrifugation at 60.000 to 100.000 g for 1 hour.

[0189] Assay to measure the immunosuppressive activity of peptides derived from HIV glycoproteins or the glycoproteins from HIV with mutations according to any of the claims:

[0190] Abrogation of Immunosuppression of dimerized peptides are considered verified if the dimerized peptides scores positive in either the PBMC or the CTLL-2 assay listed below.

### PBMC Assay

[0191] Human Peripheral Blood Mononuclear Cells (PBMC) are prepared freshly from healthy donors. These are stimulated by Con A (5 ug/mL) concomitant to peptide addition at different concentrations (i.e. 25 uM, 50 uM and 100 uM). Cultures are maintained and lymphocyte proliferation is measured 72 hrs later by EdU incorporation and Click-iT labelling with Oregon Green (Invitrogen, Denmark) as recommended by the manufacturer. The degree of activated lymphocytes is proportional to the fluorescence detection.

### CTLL-2 Assay

[0192] 100.000 CTLL-2 cells are seeded pr. well in a 48 well-plate (Nunc) in 200 uL of medium (RPMI+2 mM L-glutamine+1 mM Na-pyruvat+10% FCS+0.5 ng/mL IL-2) 2 hours later the peptides are added to the wells. 24 h later the cells are labeled using the Click-it reaction kit (Invitrogen cat. #C35002). The fluorescence of the cells is measured on a flow cytometer. The degree of proliferation in each sample is proportional to the detected fluorescence.

Percent inhibition will be calculated as:%Inh.=[control(stim.)−control(unstim.)][exper.(stim.)−exper.(unstim.)]/[control(stim.)−control(unstim.)]×100.

### Example 2

### Peptide Preparation

[0193] The peptides can be prepared by different means including, but not limited to solid phase synthesis commonly used for such purposes. The peptides can be dimerized using a cysteine residue either at the N- or C-terminal or in the middle of the peptide or by using any other molecule or atom that is covalently bound to peptide molecules.

[0194] The peptides can be coupled to a carrier protein such as BSA by covalent bounds including but not limited to disulfide bridges between the peptide cysteine residues and the carrier protein or through amino groups including those in the side chain or Lysine residues.

[0195] For peptides where solubility is an issue Aminoacids will be applayed C-terminally to increase solubility. In particular and GGEKEKEK tail has been used to increase the solubility

### Example 3

### Immunogenicity of Viral Particles

[0196] The development of a broad and neutralizing antibody response is vital for a protective HIV-1 vaccine. Protection of macaques against vaginal transmission of a pathogenic HIV-1/SIV chimeric virus by passive infusion of neutralizing antibodies). In addition, the induction of specific and effective cytotoxic T lymphocytes has been shown to be required for infection control. Control of Viremia in Simian Immunodeficiency Virus Infection by CD8+ Lymphocytes).

[0197] Thus, the development of vaccine strategies that encompass both arms of the immune system are thus important. Differential MHC I and II antigen presentation is a key factor for initiation of a potent immune response. There appear to be short-comings in antigen presentation when antigens are administered solely as peptides or DNA. In contrast cross-talk between antigen presenting cells and T helper lymphocytes are promoted in vaccine strategies based on either infectious or non-infectious viral particles. A potent induction of cell mediated immunity can be achieved even with whole-killed viral particles. Membrane embedded HIV-1 envelope on the surface of a virus-like particle elicits broader immune responses than soluble envelopes). This is likely a consequence of improved antigen uptake and systemic immunestimulation in macrophages and dendritic cells. Baculovirus-derived human immunodeficiency virus type i virus-like particle activate dendritic cells and induce ex vivo t-cell responses). To achieve potent immunogens viral particles, lentiviral particles, retroviral particles, γ-retroviral particles or any other type of viral or virus like particle may be produced with functional HIV-1 envelope trimers on the surface. These particles can either be produced in vitro (e.g. but not restricted to cell culture) or in vivo (e.g. but not restricted cells in the patient infected by a vaccinia virus like MVA) where they will function as a superior immunogenic particle/antigen.

### Example 4

### Detection of Cell Surface Expression of ENV by Flow Cytometry

[0198] The cells are labeled with anti HIV-ENV antibodies through incubation of the cells with the Ab for 45 min on ice. Followed by washing of the unbound Ab with PBS. The cell-anti envelope Ab complex is subsequently incubated with a fluorescent labeled Ab against the primary ENV-binding Ab for 45 min. on ice followed by a second PBS wash. A flow cytometer will be used to detect fluorescence associated with the cells, which is indicative of ENV expression.

### Example 5

### Detection of Incorporation of ENV into Retroviral Particles by Flow Cytometry

[0199] Supernatant containing retroviral particles is incubated with cells expressing the CD4 receptor for 45 min. on ice followed by PBS wash. The cells are subsequently labeled with anti HIV-ENV antibodies through incubation of the cells with the Ab for 45 min on ice followed by washing of the unbound Ab with PBS. The cell-anti envelope Ab complex is subsequently incubated with a fluorescent labeled Ab against the primary ENV-binding Ab for 45 min. on ice followed by a second PBS wash. A flow cytometer will be used to detect fluorescence associated with the cells, which is indicative of ENV expression.

### Example 6

### Detection of Fusogenicity of the ENV by Syncytia Assay

[0200] An Env-expressing plasmid (which may also expresses egfp marker which may or may not be targeted to the neceus is transfected into 293T cells. Two days later, the ENV-expressing cells are co-cultivated with D17 cells expressing CD4 (10,000 cells pr. square centimeter) and one or more of the HIV coreceptors (ie. CXCR4, CCR5 etc. 10,000 cells pr. square centimeter). Fusogenicity of the ENV protein can be detected by examination of the level of cell-cell fusion in a microscope, either in visible light or by green fluorescence found in the cells. The level of syncyitum formation is reflected by the number of nuclei in syncytia in an arbitrary field of vision. At least two nuclei in one syncytium indicates that fusion has happened albeit at a low level. Thus any mutant of the HIV envelope protein that causes a syncytium containing at least two nuclei is considered fusiogenic. However, in the setting described above syncytia of many dozens of nuclei can be observed. Wt envelope might cause syncyita of more than 100 nuclei to form. Any number of nuclei in synsytia from two to or above the number of nuclei in syncytia caused by wt HIV envelope protein, suggests fusiogenicity of the mutated HIV envelope proteins.

### Example 7

### Production and Test of HIV Mutant VLPs Produced Using an MVA Vaccine

[0201] To evaluate the efficacy of a modified vaccinia virus Ankara (MVA) vaccine in the SIV macaque therapeutic immunization model. MVA will selected as a vaccine vector, since it has previously shown to induce strong antiviral immune responses and protection. As viral antigens SIV Gag-Pol and HIV Env will used. The gag/pol and HIV env will be humanized in order to omit tat and rev. Infection of a cell with an MVA vector expressing these proteins will result in the transient production of VLP5 from the cell.

[0202] For vaccination of humans the SIV gag/pol can be exchanged with a humanized version of HIV gag/pol [14]

### Example 8

### Functional Test of Conformational Status of Specific HIV Envelope Mutants by

### Titer:

[0203] Virions were produced by transfection of 293T cells with a mixture of plasmids that express the envelope protein, gagpol polyprotein from HIV, Rev protein from HIV and a lentiviral vector that expresses the egfp gene. 24 h later the medium was renewed on the cells. The virions were harvested 30 hours post transfection and used to infect D17CXCR4CD4 cells in serial dilutions. Colonies that express egfp were visualized in fluorescent microscope and counted, on the basis of which the titers were estimated.

ISD#19 has a titer of 10⁵ cfu/mL
ISD#4 has a titer of 10³ cfu/mL
Wt HIV envelop has titer of 10⁵ cfu/mL

### Example 9

### Immunosuppression of Selected Peptides

[0204] The immunosuppression effect of the ISDs:

[0205] The immunes suppression was determined by the effect of peptides corresponding to ISDs on the proliferation of CTLL-2 cells.

[0206] Peptides corresponding to the following sequences containing ISDs from either wt, ISD#4 or ISD#19 were synthesized and dimerized by formation of disulfide bonds between the cystein residues.

ISD#4:
LQARILAVERGLKDQQLLGIWGCGGEKEKEK
ISD#19:
LQARIQAVERYLKDQQLLGIWGCGGEKEKEK
Wt:
LQARILAVERYLKDQQLLGIWGCGGEKEKEK

[0207] The peptides were used in the following assay:

[0208] 100.000 CTLL-2 cells were seeded pr. well in a 48 well-plate (Nunc) in 200 uL of medium (RPMI+2 mM L-glutamine+1 mM Na-pyruvat+10% FCS+0.5 ng/mL IL-2) 2 hours later the peptides were added to the wells. 24 h later the cells were labeled using the Click-it reaction kit (Invitrogen cat. #C35002). The fluorescence of the cells was measured on a flow cytometer. The degree of proliferation in each sample were proportional to the detected fluorescence.

[0209] As can be seen in FIG. 1 the wt ISD inhibits the proliferation of the CTLL2 cells at concentrations of 75 or 100 uM. Neither ISD#4 or ISD#19 inhibits the proliferation.

### REFERENCES

[0210] 1. Sapir, A., et al., Viral and developmental cell fusion mechanisms: conservation and divergence. Dev Cell, 2008. 14(1): p. 11-21.
[0211] 2. Cianciolo, G. J., et al., Murine malignant cells synthesize a 19,000-dalton protein that is physicochemically and antigenically related to the immunosuppressive retroviral protein, P15E. J Exp Med, 1983. 158(3): p. 885-900.
[0212] 3. Hebebrand, L. C., et al., Inhibition of human lymphocyte mitogen and antigen response by a 15,000-dalton protein from feline leukemia virus. Cancer Res, 1979. 39(2 Pt 1): p. 443-7.
[0213] 4. Cianciolo, G. J., et al., Macrophage accumulation in mice is inhibited by low molecular weight products from murine leukemia viruses. J Immunol, 1980. 124(6): p. 2900-5.
[0214] 5. Mangeney, M. and T. Heidmann, Tumor cells expressing a retroviral envelope escape immune rejection in vivo. Proc Natl Acad Sci USA, 1998. 95(25): p. 14920-5.
[0215] 6. Mangeney, M., et al., Placental syncytins: Genetic disjunction between the fusogenic and immunosuppressive activity of retroviral envelope proteins. Proc Natl Acad Sci USA, 2007. 104(51): p. 20534-9.
[0216] 7. Cianciolo, G. J., et al., Inhibition of lymphocyte proliferation by a synthetic peptide homologous to retroviral envelope proteins. Science, 1985. 230(4724): p. 453-5.
[0217] 8. Cianciolo, G. J., H. Bogerd, and R. Snyderman, Human retrovirus-related synthetic peptides inhibit T lymphocyte proliferation. Immunol Lett, 1988. 19(1): p. 7-13.
[0218] 9. Yaddanapudi, K., et al., Implication of a retrovirus-like glycoprotein peptide in the immunopathogenesis of Ebola and Marburg viruses. Faseb J, 2006. 20(14): p. 2519-30.
[0219] 10. Haraguchi, S., et al. Differential modulation of Th1-and Th2-related cytokine mRNA expression by a synthetic peptide homologous to a conserved domain within retroviral envelope protein. Proc Natl Acad Sci USA, 1995. 92, 3611-15.
[0220] 11. Harrell, R. A., et al Cianciolo. Suppression of the respiratory burst of human monocytes by a synthetic peptide homologous to envelope proteins of human and animal retroviruses. J Immunol, 1986. 136, 3517-520.
[0221] 12. Kleinerman, E. S., et al. Lachman. A synthetic peptidehomologous to the envelope proteins of retroviruses inhibits monocyte-mediated killing by inactivatinginterleukin 1. J Immunol, 1987. 139, 2329-337.
[0222] 13. Schlecht-Louf G. et al. Retroviral infection in vivo requires an immune escape virulence factor encrypted in the envelope protein of oncoretroviruses. Proc Natl Acad Sci USA. 2010 Feb. 23; 107(8):3782-7.
[0223] 14 Uberla K. et al. Therapeutic immunization with Modified Vaccinia Virus Ankara (MVA) vaccines in SIV-infected rhesus monkeys undergoing antiretroviral therapy. J Med. Primatol. 2007 February; 36(1):2-9.

The application's sequence listing, which the Patent Office published only in electronic form, follows.

SEQUENCE LISTING (369 sequences)

SEQ ID NO: 1 - protein, 29 aa, HIV
  misc_feature (2)..(21): Xaa can be any naturally occurring amino acid
  misc_feature (24)..(28): Xaa can be any naturally occurring amino acid
LXXXXXXXXXXXXXXXXXXXXGCXXXXXC

SEQ ID NO: 2 - protein, 29 aa, HIV
  MISC_FEATURE (1)..(4): X1:  L X2:  Q,R,N, A, G X3:  A,T,V, G, Q, R X4:  R,K,G, A, Q
  MISC_FEATURE (5)..(8): X5:  V,I,L,M, A, G, Q, R X6:  L,A,C,D,E,F,G,H,I,K,M,N,P,Q,R,S,T,V,W,Y X7:  A,T,S, G, Q, R X8:  V,I,L,Q,M, A, G, R
  MISC_FEATURE (9)..(12): X9:  E,K, A, G, Q, R X10: R,S,T,K,G,N,E,D,A, Q X11: L,A,C,D,E,F,G,H,I,K,M,N,P,Q,R,S,T,V,W,Y X12: L,V,I,M,R, A, G, Q
  MISC_FEATURE (13)..(16): X13: K,Q,R,A,E,G,S,H,W,T,V X14: D,E,N,H,G, A, Q, R X15: Q,R, A, G X16: Q,A,S,K,T,R,H,G
  MISC_FEATURE (17)..(20): X17: L,M,S,Q,R,H,I,V,F, A X18: L,M X19: G,N,S,A,Q,R X20: I,L,S,A,T,E,V,M,F
  MISC_FEATURE (21)..(24): X21: W,F X22: G X23: C X24: S,K,T,Q,R,A
  MISC_FEATURE (25)..(28): X25: G,F,D,N,W X26: K,N,R,F,M,Q,A,S X27: L,H,P,A,Q,S,T,W,I,V,F,R X28: I,V,T
  MISC_FEATURE (29)..(29): X29: C
LXXXXXXXXXXXXXXXXXXXXGCXXXXXC

SEQ ID NO: 3 - protein, 29 aa, HIV
  MISC_FEATURE (1)..(4): X1:  L X2:  Q,R, A, G X3:  A,T, G, Q, R X4:  R,K,G, A, Q
  MISC_FEATURE (5)..(8): X5:  V,I,L, A, G, Q, R X6:  L,A,C,D,E,F,G,H,I,K,M,N,P,Q,R,S,T,V,W,Y X7:  A,S,T, G, Q, R X8:  V,I,L,M, A, G, Q, R
  MISC_FEATURE (9)..(12): X9:  E,K, A, G, Q, R X10: R,S,T,K,G,A, Q X11: L,A,C,D,E,F,G,H,I,K,M,N,P,Q,R,S,T,V,W,Y X12: L,V,I,M, A, G, Q, R
  MISC_FEATURE (13)..(16): X13: K,Q,R,A,E,G,S,H,W,T,V X14: D,N,G, A, Q, R X15: Q,R, A, G X16: Q,K,T,R,H, A, G
  MISC_FEATURE (17)..(20): X17: L,R,I,F, G, Q X18: L,M X19: G,N,S,R X20: I,L,S,A,T,E,V,M,F
  MISC_FEATURE (21)..(24): X21: W X22: G X23: C X24: S,K,T,R,A
  MISC_FEATURE (25)..(28): X25: G X26: K,N,R X27: L,H,P,A,Q,S,T,W,I,V,F,R X28: I,V
  MISC_FEATURE (29)..(29): X29: C
LXXXXXXXXXXXXXXXXXXXXGCXXXXXC

SEQ ID NO: 4 - protein, 29 aa, HIV
  MISC_FEATURE (1)..(4): X1:  L X2:  Q,R, A, G X3:  A,T, G, Q, R X4:  R,K, A, G, Q
  MISC_FEATURE (5)..(8): X5:  V,I,L, A, G, Q, R X6:  L,A,C,D,E,F,G,H,I,K,M,N,P,Q,R,S,T,V,W,Y X7:  A,S,T, G, Q, R X8:  V,I,L, A, G, Q, R
  MISC_FEATURE (9)..(12): X9:  E,K, A, G, Q, R X10: R,S,T,K,G,A, Q X11: L,A,C,D,E,F,G,H,I,K,M,N,P,Q,R,S,T,V,W,Y X12: L,V,I,M, A, G, Q, R
  MISC_FEATURE (13)..(16): X13: K,Q,R,A,E,G,S,H,W,T,V, A, G X14: D,N, A, G, Q, R X15: Q,R, A, G X16: Q,K,T,R, A, G
  MISC_FEATURE (17)..(20): X17: L,R,I,F, A, G, Q X18: L X19: G,N,S,R X20: I,L,S,V,F
  MISC_FEATURE (21)..(24): X21: W X22: G X23: C X24: S,K,T,A
  MISC_FEATURE (25)..(28): X25: G X26: K,R X27: L,H,P,A,Q,S,T,W,I,V,F,R X28: I,V
  MISC_FEATURE (29)..(29): X29:C
LXXXXXXXXXXXXXXXXXXXXGCXXXXXC

SEQ ID NO: 5 - protein, 23 aa, HIV
LQARILAVERGLKDQQLLGIWGC

SEQ ID NO: 6 - protein, 23 aa, HIV
LQARIQAVERYLKDQQLLGIWGC

SEQ ID NO: 7 - protein, 29 aa, HIV
  misc_feature (2)..(5): Xaa can be any naturally occurring amino acid
  misc_feature (7)..(21): Xaa can be any naturally occurring amino acid
  misc_feature (24)..(28): Xaa can be any naturally occurring amino acid
LXXXXAXXXXXXXXXXXXXXXGCXXXXXC

SEQ ID NO: 8 - protein, 29 aa, HIV
  misc_feature (2)..(5): Xaa can be any naturally occurring amino acid
  misc_feature (7)..(21): Xaa can be any naturally occurring amino acid
  misc_feature (24)..(28): Xaa can be any naturally occurring amino acid
LXXXXCXXXXXXXXXXXXXXXGCXXXXXC

SEQ ID NO: 9 - protein, 29 aa, HIV
  misc_feature (2)..(5): Xaa can be any naturally occurring amino acid
  misc_feature (7)..(21): Xaa can be any naturally occurring amino acid
  misc_feature (24)..(28): Xaa can be any naturally occurring amino acid
LXXXXDXXXXXXXXXXXXXXXGCXXXXXC

SEQ ID NO: 10 - protein, 29 aa, HIV
  misc_feature (2)..(5): Xaa can be any naturally occurring amino acid
  misc_feature (7)..(21): Xaa can be any naturally occurring amino acid
  misc_feature (24)..(28): Xaa can be any naturally occurring amino acid
LXXXXEXXXXXXXXXXXXXXXGCXXXXXC

SEQ ID NO: 11 - protein, 29 aa, HIV
  misc_feature (2)..(5): Xaa can be any naturally occurring amino acid
  misc_feature (7)..(21): Xaa can be any naturally occurring amino acid
  misc_feature (24)..(28): Xaa can be any naturally occurring amino acid
LXXXXFXXXXXXXXXXXXXXXGCXXXXXC

SEQ ID NO: 12 - protein, 29 aa, HIV
  misc_feature (2)..(5): Xaa can be any naturally occurring amino acid
  misc_feature (7)..(21): Xaa can be any naturally occurring amino acid
  misc_feature (24)..(28): Xaa can be any naturally occurring amino acid
LXXXXGXXXXXXXXXXXXXXXGCXXXXXC

SEQ ID NO: 13 - protein, 29 aa, HIV
  misc_feature (2)..(5): Xaa can be any naturally occurring amino acid
  misc_feature (7)..(21): Xaa can be any naturally occurring amino acid
  misc_feature (24)..(28): Xaa can be any naturally occurring amino acid
LXXXXHXXXXXXXXXXXXXXXGCXXXXXC

SEQ ID NO: 14 - protein, 29 aa, HIV
  misc_feature (2)..(5): Xaa can be any naturally occurring amino acid
  misc_feature (7)..(21): Xaa can be any naturally occurring amino acid
  misc_feature (24)..(28): Xaa can be any naturally occurring amino acid
LXXXXIXXXXXXXXXXXXXXXGCXXXXXC

SEQ ID NO: 15 - protein, 29 aa, HIV
  misc_feature (2)..(5): Xaa can be any naturally occurring amino acid
  misc_feature (7)..(21): Xaa can be any naturally occurring amino acid
  misc_feature (24)..(28): Xaa can be any naturally occurring amino acid
LXXXXKXXXXXXXXXXXXXXXGCXXXXXC

SEQ ID NO: 16 - protein, 29 aa, HIV
  misc_feature (2)..(5): Xaa can be any naturally occurring amino acid
  misc_feature (7)..(21): Xaa can be any naturally occurring amino acid
  misc_feature (24)..(28): Xaa can be any naturally occurring amino acid
LXXXXMXXXXXXXXXXXXXXXGCXXXXXC

SEQ ID NO: 17 - protein, 29 aa, HIV
  misc_feature (2)..(5): Xaa can be any naturally occurring amino acid
  misc_feature (7)..(21): Xaa can be any naturally occurring amino acid
  misc_feature (24)..(28): Xaa can be any naturally occurring amino acid
LXXXXNXXXXXXXXXXXXXXXGCXXXXXC

SEQ ID NO: 18 - protein, 29 aa, HIV
  misc_feature (2)..(5): Xaa can be any naturally occurring amino acid
  misc_feature (7)..(21): Xaa can be any naturally occurring amino acid
  misc_feature (24)..(28): Xaa can be any naturally occurring amino acid
LXXXXPXXXXXXXXXXXXXXXGCXXXXXC

SEQ ID NO: 19 - protein, 29 aa, HIV
  misc_feature (2)..(5): Xaa can be any naturally occurring amino acid
  misc_feature (7)..(21): Xaa can be any naturally occurring amino acid
  misc_feature (24)..(28): Xaa can be any naturally occurring amino acid
LXXXXQXXXXXXXXXXXXXXXGCXXXXXC

SEQ ID NO: 20 - protein, 29 aa, HIV
  misc_feature (2)..(5): Xaa can be any naturally occurring amino acid
  misc_feature (7)..(21): Xaa can be any naturally occurring amino acid
  misc_feature (24)..(28): Xaa can be any naturally occurring amino acid
LXXXXRXXXXXXXXXXXXXXXGCXXXXXC

SEQ ID NO: 21 - protein, 29 aa, HIV
  misc_feature (2)..(5): Xaa can be any naturally occurring amino acid
  misc_feature (7)..(21): Xaa can be any naturally occurring amino acid
  misc_feature (24)..(28): Xaa can be any naturally occurring amino acid
LXXXXSXXXXXXXXXXXXXXXGCXXXXXC

SEQ ID NO: 22 - protein, 29 aa, HIV
  misc_feature (2)..(5): Xaa can be any naturally occurring amino acid
  misc_feature (7)..(21): Xaa can be any naturally occurring amino acid
  misc_feature (24)..(28): Xaa can be any naturally occurring amino acid
LXXXXTXXXXXXXXXXXXXXXGCXXXXXC

SEQ ID NO: 23 - protein, 29 aa, HIV
  misc_feature (2)..(5): Xaa can be any naturally occurring amino acid
  misc_feature (7)..(21): Xaa can be any naturally occurring amino acid
  misc_feature (24)..(28): Xaa can be any naturally occurring amino acid
LXXXXVXXXXXXXXXXXXXXXGCXXXXXC

SEQ ID NO: 24 - protein, 29 aa, HIV
  misc_feature (2)..(5): Xaa can be any naturally occurring amino acid
  misc_feature (7)..(21): Xaa can be any naturally occurring amino acid
  misc_feature (24)..(28): Xaa can be any naturally occurring amino acid
LXXXXWXXXXXXXXXXXXXXXGCXXXXXC

SEQ ID NO: 25 - protein, 29 aa, HIV
  misc_feature (2)..(5): Xaa can be any naturally occurring amino acid
  misc_feature (7)..(21): Xaa can be any naturally occurring amino acid
  misc_feature (24)..(28): Xaa can be any naturally occurring amino acid
LXXXXYXXXXXXXXXXXXXXXGCXXXXXC

SEQ ID NO: 26 - protein, 29 aa, HIV
  misc_feature (2)..(10): Xaa can be any naturally occurring amino acid
  misc_feature (12)..(21): Xaa can be any naturally occurring amino acid
  misc_feature (24)..(28): Xaa can be any naturally occurring amino acid
LXXXXXXXXXAXXXXXXXXXXGCXXXXXC

SEQ ID NO: 27 - protein, 29 aa, HIV
  misc_feature (2)..(10): Xaa can be any naturally occurring amino acid
  misc_feature (12)..(21): Xaa can be any naturally occurring amino acid
  misc_feature (24)..(28): Xaa can be any naturally occurring amino acid
LXXXXXXXXXCXXXXXXXXXXGCXXXXXC

SEQ ID NO: 28 - protein, 29 aa, HIV
  misc_feature (2)..(10): Xaa can be any naturally occurring amino acid
  misc_feature (12)..(21): Xaa can be any naturally occurring amino acid
  misc_feature (24)..(28): Xaa can be any naturally occurring amino acid
LXXXXXXXXXDXXXXXXXXXXGCXXXXXC

SEQ ID NO: 29 - protein, 29 aa, HIV
  misc_feature (2)..(10): Xaa can be any naturally occurring amino acid
  misc_feature (12)..(21): Xaa can be any naturally occurring amino acid
  misc_feature (24)..(28): Xaa can be any naturally occurring amino acid
LXXXXXXXXXEXXXXXXXXXXGCXXXXXC

SEQ ID NO: 30 - protein, 29 aa, HIV
  misc_feature (2)..(10): Xaa can be any naturally occurring amino acid
  misc_feature (12)..(21): Xaa can be any naturally occurring amino acid
  misc_feature (24)..(28): Xaa can be any naturally occurring amino acid
LXXXXXXXXXFXXXXXXXXXXGCXXXXXC

SEQ ID NO: 31 - protein, 29 aa, HIV
  misc_feature (2)..(10): Xaa can be any naturally occurring amino acid
  misc_feature (12)..(21): Xaa can be any naturally occurring amino acid
  misc_feature (24)..(28): Xaa can be any naturally occurring amino acid
LXXXXXXXXXGXXXXXXXXXXGCXXXXXC

SEQ ID NO: 32 - protein, 29 aa, HIV
  misc_feature (2)..(10): Xaa can be any naturally occurring amino acid
  misc_feature (12)..(21): Xaa can be any naturally occurring amino acid
  misc_feature (24)..(28): Xaa can be any naturally occurring amino acid
LXXXXXXXXXHXXXXXXXXXXGCXXXXXC

SEQ ID NO: 33 - protein, 29 aa, HIV
  misc_feature (2)..(10): Xaa can be any naturally occurring amino acid
  misc_feature (12)..(21): Xaa can be any naturally occurring amino acid
  misc_feature (24)..(28): Xaa can be any naturally occurring amino acid
LXXXXXXXXXIXXXXXXXXXXGCXXXXXC

SEQ ID NO: 34 - protein, 29 aa, HIV
  misc_feature (2)..(10): Xaa can be any naturally occurring amino acid
  misc_feature (12)..(21): Xaa can be any naturally occurring amino acid
  misc_feature (24)..(28): Xaa can be any naturally occurring amino acid
LXXXXXXXXXKXXXXXXXXXXGCXXXXXC

SEQ ID NO: 35 - protein, 29 aa, HIV
  misc_feature (2)..(10): Xaa can be any naturally occurring amino acid
  misc_feature (12)..(21): Xaa can be any naturally occurring amino acid
  misc_feature (24)..(28): Xaa can be any naturally occurring amino acid
LXXXXXXXXXLXXXXXXXXXXGCXXXXXC

SEQ ID NO: 36 - protein, 29 aa, HIV
  misc_feature (2)..(10): Xaa can be any naturally occurring amino acid
  misc_feature (12)..(21): Xaa can be any naturally occurring amino acid
  misc_feature (24)..(28): Xaa can be any naturally occurring amino acid
LXXXXXXXXXMXXXXXXXXXXGCXXXXXC

SEQ ID NO: 37 - protein, 29 aa, HIV
  misc_feature (2)..(10): Xaa can be any naturally occurring amino acid
  misc_feature (12)..(21): Xaa can be any naturally occurring amino acid
  misc_feature (24)..(28): Xaa can be any naturally occurring amino acid
LXXXXXXXXXNXXXXXXXXXXGCXXXXXC

SEQ ID NO: 38 - protein, 29 aa, HIV
  misc_feature (2)..(10): Xaa can be any naturally occurring amino acid
  misc_feature (12)..(21): Xaa can be any naturally occurring amino acid
  misc_feature (24)..(28): Xaa can be any naturally occurring amino acid
LXXXXXXXXXPXXXXXXXXXXGCXXXXXC

SEQ ID NO: 39 - protein, 29 aa, HIV
  misc_feature (2)..(10): Xaa can be any naturally occurring amino acid
  misc_feature (12)..(21): Xaa can be any naturally occurring amino acid
  misc_feature (24)..(28): Xaa can be any naturally occurring amino acid
LXXXXXXXXXQXXXXXXXXXXGCXXXXXC

SEQ ID NO: 40 - protein, 29 aa, HIV
  misc_feature (2)..(10): Xaa can be any naturally occurring amino acid
  misc_feature (12)..(21): Xaa can be any naturally occurring amino acid
  misc_feature (24)..(28): Xaa can be any naturally occurring amino acid
LXXXXXXXXXRXXXXXXXXXXGCXXXXXC

SEQ ID NO: 41 - protein, 29 aa, HIV
  misc_feature (2)..(10): Xaa can be any naturally occurring amino acid
  misc_feature (12)..(21): Xaa can be any naturally occurring amino acid
  misc_feature (24)..(28): Xaa can be any naturally occurring amino acid
LXXXXXXXXXSXXXXXXXXXXGCXXXXXC

SEQ ID NO: 42 - protein, 29 aa, HIV
  misc_feature (2)..(10): Xaa can be any naturally occurring amino acid
  misc_feature (12)..(21): Xaa can be any naturally occurring amino acid
  misc_feature (24)..(28): Xaa can be any naturally occurring amino acid
LXXXXXXXXXTXXXXXXXXXXGCXXXXXC

SEQ ID NO: 43 - protein, 29 aa, HIV
  misc_feature (2)..(10): Xaa can be any naturally occurring amino acid
  misc_feature (12)..(21): Xaa can be any naturally occurring amino acid
  misc_feature (24)..(28): Xaa can be any naturally occurring amino acid
LXXXXXXXXXVXXXXXXXXXXGCXXXXXC

SEQ ID NO: 44 - protein, 29 aa, HIV
  misc_feature (2)..(10): Xaa can be any naturally occurring amino acid
  misc_feature (12)..(21): Xaa can be any naturally occurring amino acid
  misc_feature (24)..(28): Xaa can be any naturally occurring amino acid
LXXXXXXXXXWXXXXXXXXXXGCXXXXXC

SEQ ID NO: 45 - protein, 29 aa, HIV
LAARILAVERYLKDQQLLGIWGCSGKLIC

SEQ ID NO: 46 - protein, 29 aa, HIV
LQAAILAVERYLKDQQLLGIWGCSGKLIC

SEQ ID NO: 47 - protein, 29 aa, HIV
LQARALAVERYLKDQQLLGIWGCSGKLIC

SEQ ID NO: 48 - protein, 29 aa, HIV
LQARIAAVERYLKDQQLLGIWGCSGKLIC

SEQ ID NO: 49 - protein, 29 aa, HIV
LQARILAAERYLKDQQLLGIWGCSGKLIC

SEQ ID NO: 50 - protein, 29 aa, HIV
LQARILAVARYLKDQQLLGIWGCSGKLIC

SEQ ID NO: 51 - protein, 29 aa, HIV
LQARILAVEAYLKDQQLLGIWGCSGKLIC

SEQ ID NO: 52 - protein, 29 aa, HIV
LQARILAVERALKDQQLLGIWGCSGKLIC

SEQ ID NO: 53 - protein, 29 aa, HIV
LQARILAVERYAKDQQLLGIWGCSGKLIC

SEQ ID NO: 54 - protein, 29 aa, HIV
LQARILAVERYLADQQLLGIWGCSGKLIC

SEQ ID NO: 55 - protein, 29 aa, HIV
LQARILAVERYLKAQQLLGIWGCSGKLIC

SEQ ID NO: 56 - protein, 29 aa, HIV
LQARILAVERYLKDAQLLGIWGCSGKLIC

SEQ ID NO: 57 - protein, 29 aa, HIV
LQARILAVERYLKDQALLGIWGCSGKLIC

SEQ ID NO: 58 - protein, 29 aa, HIV
LQARILAVERYLKDQQALGIWGCSGKLIC

SEQ ID NO: 59 - protein, 29 aa, HIV
LGARILAVERYLKDQQLLGIWGCSGKLIC

SEQ ID NO: 60 - protein, 29 aa, HIV
LQGRILAVERYLKDQQLLGIWGCSGKLIC

SEQ ID NO: 61 - protein, 29 aa, HIV
LQAGILAVERYLKDQQLLGIWGCSGKLIC

SEQ ID NO: 62 - protein, 29 aa, HIV
LQARGLAVERYLKDQQLLGIWGCSGKLIC

SEQ ID NO: 63 - protein, 29 aa, HIV
LQARIGAVERYLKDQQLLGIWGCSGKLIC

SEQ ID NO: 64 - protein, 29 aa, HIV
LQARILGVERYLKDQQLLGIWGCSGKLIC

SEQ ID NO: 65 - protein, 29 aa, HIV
LQARILAGERYLKDQQLLGIWGCSGKLIC

SEQ ID NO: 66 - protein, 29 aa, HIV
LQARILAVGRYLKDQQLLGIWGCSGKLIC

SEQ ID NO: 67 - protein, 29 aa, HIV
LQARILAVEGYLKDQQLLGIWGCSGKLIC

SEQ ID NO: 68 - protein, 29 aa, HIV
LQARILAVERGLKDQQLLGIWGCSGKLIC

SEQ ID NO: 69 - protein, 29 aa, HIV
LQARILAVERYGKDQQLLGIWGCSGKLIC

SEQ ID NO: 70 - protein, 29 aa, HIV
LQARILAVERYLGDQQLLGIWGCSGKLIC

SEQ ID NO: 71 - protein, 29 aa, HIV
LQARILAVERYLKGQQLLGIWGCSGKLIC

SEQ ID NO: 72 - protein, 29 aa, HIV
LQARILAVERYLKDGQLLGIWGCSGKLIC

SEQ ID NO: 73 - protein, 29 aa, HIV
LQARILAVERYLKDQGLLGIWGCSGKLIC

SEQ ID NO: 74 - protein, 29 aa, HIV
LQARILAVERYLKDQQGLGIWGCSGKLIC

SEQ ID NO: 75 - protein, 29 aa, HIV
LQARILAVERYLKDQQLLGIWGCSGKLIC

SEQ ID NO: 76 - protein, 29 aa, HIV
LQQRILAVERYLKDQQLLGIWGCSGKLIC

SEQ ID NO: 77 - protein, 29 aa, HIV
LQAQILAVERYLKDQQLLGIWGCSGKLIC

SEQ ID NO: 78 - protein, 29 aa, HIV
LQARQLAVERYLKDQQLLGIWGCSGKLIC

SEQ ID NO: 79 - protein, 29 aa, HIV
LQARIQAVERYLKDQQLLGIWGCSGKLIC

SEQ ID NO: 80 - protein, 29 aa, HIV
LQARILQVERYLKDQQLLGIWGCSGKLIC

SEQ ID NO: 81 - protein, 29 aa, HIV
LQARILAQERYLKDQQLLGIWGCSGKLIC

SEQ ID NO: 82 - protein, 29 aa, HIV
LQARILAVQRYLKDQQLLGIWGCSGKLIC

SEQ ID NO: 83 - protein, 29 aa, HIV
LQARILAVEQYLKDQQLLGIWGCSGKLIC

SEQ ID NO: 84 - protein, 29 aa, HIV
LQARILAVERQLKDQQLLGIWGCSGKLIC

SEQ ID NO: 85 - protein, 29 aa, HIV
LQARILAVERYQKDQQLLGIWGCSGKLIC

SEQ ID NO: 86 - protein, 29 aa, HIV
LQARILAVERYLQDQQLLGIWGCSGKLIC

SEQ ID NO: 87 - protein, 29 aa, HIV
LQARILAVERYLKQQQLLGIWGCSGKLIC

SEQ ID NO: 88 - protein, 29 aa, HIV
LQARILAVERYLKDQQQLGIWGCSGKLIC

SEQ ID NO: 89 - protein, 29 aa, HIV
LRARILAVERYLKDQQLLGIWGCSGKLIC

SEQ ID NO: 90 - protein, 29 aa, HIV
LQRRILAVERYLKDQQLLGIWGCSGKLIC

SEQ ID NO: 91 - protein, 29 aa, HIV
LQARRLAVERYLKDQQLLGIWGCSGKLIC

SEQ ID NO: 92 - protein, 29 aa, HIV
LQARIRAVERYLKDQQLLGIWGCSGKLIC

SEQ ID NO: 93 - protein, 29 aa, HIV
LQARILRVERYLKDQQLLGIWGCSGKLIC

SEQ ID NO: 94 - protein, 29 aa, HIV
LQARILARERYLKDQQLLGIWGCSGKLIC

SEQ ID NO: 95 - protein, 29 aa, HIV
LQARILAVRRYLKDQQLLGIWGCSGKLIC

SEQ ID NO: 96 - protein, 29 aa, HIV
LQARILAVERRLKDQQLLGIWGCSGKLIC

SEQ ID NO: 97 - protein, 29 aa, HIV
LQARILAVERYRKDQQLLGIWGCSGKLIC

SEQ ID NO: 98 - protein, 29 aa, HIV
LQARILAVERYLRDQQLLGIWGCSGKLIC

SEQ ID NO: 99 - protein, 29 aa, HIV
LQARILAVERYLKRQQLLGIWGCSGKLIC

SEQ ID NO: 100 - protein, 29 aa, HIV
LQARILAVERYLKDRQLLGIWGCSGKLIC

SEQ ID NO: 101 - protein, 29 aa, HIV
LQARILAVERYLKDQRLLGIWGCSGKLIC

SEQ ID NO: 102 - protein, 29 aa, HIV
LQARILAVERYLKDQQRLGIWGCSGKLIC

SEQ ID NO: 103 - protein, 29 aa, HIV
LAARVLAVERYLKDQQLLGIWGCSGKLIC

SEQ ID NO: 104 - protein, 29 aa, HIV
LQAAVLAVERYLKDQQLLGIWGCSGKLIC

SEQ ID NO: 105 - protein, 29 aa, HIV
LQARALAVERYLKDQQLLGIWGCSGKLIC

SEQ ID NO: 106 - protein, 29 aa, HIV
LQARVAAVERYLKDQQLLGIWGCSGKLIC

SEQ ID NO: 107 - protein, 29 aa, HIV
LQARVLAAERYLKDQQLLGIWGCSGKLIC

SEQ ID NO: 108 - protein, 29 aa, HIV
LQARVLAVARYLKDQQLLGIWGCSGKLIC

SEQ ID NO: 109 - protein, 29 aa, HIV
LQARVLAVEAYLKDQQLLGIWGCSGKLIC

SEQ ID NO: 110 - protein, 29 aa, HIV
LQARVLAVERALKDQQLLGIWGCSGKLIC

SEQ ID NO: 111 - protein, 29 aa, HIV
LQARVLAVERYAKDQQLLGIWGCSGKLIC

SEQ ID NO: 112 - protein, 29 aa, HIV
LQARVLAVERYLADQQLLGIWGCSGKLIC

SEQ ID NO: 113 - protein, 29 aa, HIV
LQARVLAVERYLKAQQLLGIWGCSGKLIC

SEQ ID NO: 114 - protein, 29 aa, HIV
LQARVLAVERYLKDAQLLGIWGCSGKLIC

SEQ ID NO: 115 - protein, 29 aa, HIV
LQARVLAVERYLKDQALLGIWGCSGKLIC

SEQ ID NO: 116 - protein, 29 aa, HIV
LQARVLAVERYLKDQQALGIWGCSGKLIC

SEQ ID NO: 117 - protein, 29 aa, HIV
LGARVLAVERYLKDQQLLGIWGCSGKLIC

SEQ ID NO: 118 - protein, 29 aa, HIV
LQGRVLAVERYLKDQQLLGIWGCSGKLIC

SEQ ID NO: 119 - protein, 29 aa, HIV
LQAGVLAVERYLKDQQLLGIWGCSGKLIC

SEQ ID NO: 120 - protein, 29 aa, HIV
LQARGLAVERYLKDQQLLGIWGCSGKLIC

SEQ ID NO: 121 - protein, 29 aa, HIV
LQARVGAVERYLKDQQLLGIWGCSGKLIC

SEQ ID NO: 122 - protein, 29 aa, HIV
LQARVLGVERYLKDQQLLGIWGCSGKLIC

SEQ ID NO: 123 - protein, 29 aa, HIV
LQARVLAGERYLKDQQLLGIWGCSGKLIC

SEQ ID NO: 124 - protein, 29 aa, HIV
LQARVLAVGRYLKDQQLLGIWGCSGKLIC

SEQ ID NO: 125 - protein, 29 aa, HIV
LQARVLAVEGYLKDQQLLGIWGCSGKLIC

SEQ ID NO: 126 - protein, 29 aa, HIV
LQARVLAVERGLKDQQLLGIWGCSGKLIC

SEQ ID NO: 127 - protein, 29 aa, HIV
LQARVLAVERYGKDQQLLGIWGCSGKLIC

SEQ ID NO: 128 - protein, 29 aa, HIV
LQARVLAVERYLGDQQLLGIWGCSGKLIC

SEQ ID NO: 129 - protein, 29 aa, HIV
LQARVLAVERYLKGQQLLGIWGCSGKLIC

SEQ ID NO: 130 - protein, 29 aa, HIV
LQARVLAVERYLKDGQLLGIWGCSGKLIC

SEQ ID NO: 131 - protein, 29 aa, HIV
LQARVLAVERYLKDQGLLGIWGCSGKLIC

SEQ ID NO: 132 - protein, 29 aa, HIV
LQARVLAVERYLKDQQGLGIWGCSGKLIC

SEQ ID NO: 133 - protein, 29 aa, HIV
LQARVLAVERYLKDQQLLGIWGCSGKLIC

SEQ ID NO: 134 - protein, 29 aa, HIV
LQQRVLAVERYLKDQQLLGIWGCSGKLIC

SEQ ID NO: 135 - protein, 29 aa, HIV
LQAQVLAVERYLKDQQLLGIWGCSGKLIC

SEQ ID NO: 136 - protein, 29 aa, HIV
LQARQLAVERYLKDQQLLGIWGCSGKLIC

SEQ ID NO: 137 - protein, 29 aa, HIV
LQARVQAVERYLKDQQLLGIWGCSGKLIC

SEQ ID NO: 138 - protein, 29 aa, HIV
LQARVLQVERYLKDQQLLGIWGCSGKLIC

SEQ ID NO: 139 - protein, 29 aa, HIV
LQARVLAQERYLKDQQLLGIWGCSGKLIC

SEQ ID NO: 140 - protein, 29 aa, HIV
LQARVLAVQRYLKDQQLLGIWGCSGKLIC

SEQ ID NO: 141 - protein, 29 aa, HIV
LQARVLAVEQYLKDQQLLGIWGCSGKLIC

SEQ ID NO: 142 - protein, 29 aa, HIV
LQARVLAVERQLKDQQLLGIWGCSGKLIC

SEQ ID NO: 143 - protein, 29 aa, HIV
LQARVLAVERYQKDQQLLGIWGCSGKLIC

SEQ ID NO: 144 - protein, 29 aa, HIV
LQARVLAVERYLQDQQLLGIWGCSGKLIC

SEQ ID NO: 145 - protein, 29 aa, HIV
LQARVLAVERYLKQQQLLGIWGCSGKLIC

SEQ ID NO: 146 - protein, 29 aa, HIV
LQARVLAVERYLKDQQQLGIWGCSGKLIC

SEQ ID NO: 147 - protein, 29 aa, HIV
LRARVLAVERYLKDQQLLGIWGCSGKLIC

SEQ ID NO: 148 - protein, 29 aa, HIV
LQRRVLAVERYLKDQQLLGIWGCSGKLIC

SEQ ID NO: 149 - protein, 29 aa, HIV
LQARRLAVERYLKDQQLLGIWGCSGKLIC

SEQ ID NO: 150 - protein, 29 aa, HIV
LQARVRAVERYLKDQQLLGIWGCSGKLIC

SEQ ID NO: 151 - protein, 29 aa, HIV
LQARVLRVERYLKDQQLLGIWGCSGKLIC

SEQ ID NO: 152 - protein, 29 aa, HIV
LQARVLARERYLKDQQLLGIWGCSGKLIC

SEQ ID NO: 153 - protein, 29 aa, HIV
LQARVLAVRRYLKDQQLLGIWGCSGKLIC

SEQ ID NO: 154 - protein, 29 aa, HIV
LQARVLAVERRLKDQQLLGIWGCSGKLIC

SEQ ID NO: 155 - protein, 29 aa, HIV
LQARVLAVERYRKDQQLLGIWGCSGKLIC

SEQ ID NO: 156 - protein, 29 aa, HIV
LQARVLAVERYLRDQQLLGIWGCSGKLIC

SEQ ID NO: 157 - protein, 29 aa, HIV
LQARVLAVERYLKRQQLLGIWGCSGKLIC

SEQ ID NO: 158 - protein, 29 aa, HIV
LQARVLAVERYLKDRQLLGIWGCSGKLIC

SEQ ID NO: 159 - protein, 29 aa, HIV
LQARVLAVERYLKDQRLLGIWGCSGKLIC

SEQ ID NO: 160 - protein, 29 aa, HIV
LQARVLAVERYLKDQQRLGIWGCSGKLIC

SEQ ID NO: 161 - protein, 29 aa, HIV
LQARINAVERYLKDQQLLGIWGCSGKLIC

SEQ ID NO: 162 - protein, 29 aa, HIV
LQARIRAVERYLKDQQLLGIWGCSGKLIC

SEQ ID NO: 163 - protein, 29 aa, HIV
LQARIIAVERYLKDQQLLGIWGCSGKLIC

SEQ ID NO: 164 - protein, 29 aa, HIV
LQARIGAVERYLKDQQLLGIWGCSGKLIC

SEQ ID NO: 165 - protein, 29 aa, HIV
LQARIWAVERYLKDQQLLGIWGCSGKLIC

SEQ ID NO: 166 - protein, 29 aa, HIV
LQARIEAVERYLKDQQLLGIWGCSGKLIC

SEQ ID NO: 167 - protein, 29 aa, HIV
LQARIDAVERYLKDQQLLGIWGCSGKLIC

SEQ ID NO: 168 - protein, 29 aa, HIV
LQARIKAVERYLKDQQLLGIWGCSGKLIC

SEQ ID NO: 169 - protein, 29 aa, HIV
LQARITAVERYLKDQQLLGIWGCSGKLIC

SEQ ID NO: 170 - protein, 29 aa, HIV
LQARISAVERYLKDQQLLGIWGCSGKLIC

SEQ ID NO: 171 - protein, 29 aa, HIV
LQARIFAVERYLKDQQLLGIWGCSGKLIC

SEQ ID NO: 172 - protein, 29 aa, HIV
LQARIHAVERYLKDQQLLGIWGCSGKLIC

SEQ ID NO: 173 - protein, 29 aa, HIV
LQARIMAVERYLKDQQLLGIWGCSGKLIC

SEQ ID NO: 174 - protein, 29 aa, HIV
LQARIPAVERYLKDQQLLGIWGCSGKLIC

SEQ ID NO: 175 - protein, 29 aa, HIV
LQARIVAVERYLKDQQLLGIWGCSGKLIC

SEQ ID NO: 176 - protein, 29 aa, HIV
LQARIQAVERYLKDQQLLGIWGCSGKLIC

SEQ ID NO: 177 - protein, 29 aa, HIV
LQARIYAVERYLKDQQLLGIWGCSGKLIC

SEQ ID NO: 178 - protein, 29 aa, HIV
LQARILAVERALKDQQLLGIWGCSGKLIC

SEQ ID NO: 179 - protein, 29 aa, HIV
LQARILAVERDLKDQQLLGIWGCSGKLIC

SEQ ID NO: 180 - protein, 29 aa, HIV
LQARILAVERELKDQQLLGIWGCSGKLIC

SEQ ID NO: 181 - protein, 29 aa, HIV
LQARILAVERFLKDQQLLGIWGCSGKLIC

SEQ ID NO: 182 - protein, 29 aa, HIV
LQARILAVERGLKDQQLLGIWGCSGKLIC

SEQ ID NO: 183 - protein, 29 aa, HIV
LQARILAVERHLKDQQLLGIWGCSGKLIC

SEQ ID NO: 184 - protein, 29 aa, HIV
LQARILAVERILKDQQLLGIWGCSGKLIC

SEQ ID NO: 185 - protein, 29 aa, HIV
LQARILAVERKLKDQQLLGIWGCSGKLIC

SEQ ID NO: 186 - protein, 29 aa, HIV
LQARILAVERLLKDQQLLGIWGCSGKLIC

SEQ ID NO: 187 - protein, 29 aa, HIV
LQARILAVERMLKDQQLLGIWGCSGKLIC

SEQ ID NO: 188 - protein, 29 aa, HIV
LQARILAVERPLKDQQLLGIWGCSGKLIC

SEQ ID NO: 189 - protein, 29 aa, HIV
LQARILAVERQLKDQQLLGIWGCSGKLIC

SEQ ID NO: 190 - protein, 29 aa, HIV
LQARILAVERRLKDQQLLGIWGCSGKLIC

SEQ ID NO: 191 - protein, 29 aa, HIV
LQARILAVERSLKDQQLLGIWGCSGKLIC

SEQ ID NO: 192 - protein, 29 aa, HIV
LQARILAVERTLKDQQLLGIWGCSGKLIC

SEQ ID NO: 193 - protein, 29 aa, HIV
LQARILAVERVLKDQQLLGIWGCSGKLIC

SEQ ID NO: 194 - protein, 29 aa, HIV
LQARILAVERWLKDQQLLGIWGCSGKLIC

SEQ ID NO: 195 - protein, 29 aa, HIV
LQARVNAVERYLKDQQLLGIWGCSGKLIC

SEQ ID NO: 196 - protein, 29 aa, HIV
LQARVRAVERYLKDQQLLGIWGCSGKLIC

SEQ ID NO: 197 - protein, 29 aa, HIV
LQARVIAVERYLKDQQLLGIWGCSGKLIC

SEQ ID NO: 198 - protein, 29 aa, HIV
LQARVGAVERYLKDQQLLGIWGCSGKLIC

SEQ ID NO: 199 - protein, 29 aa, HIV
LQARVWAVERYLKDQQLLGIWGCSGKLIC

SEQ ID NO: 200 - protein, 29 aa, HIV
LQARVEAVERYLKDQQLLGIWGCSGKLIC

SEQ ID NO: 201 - protein, 29 aa, HIV
LQARVDAVERYLKDQQLLGIWGCSGKLIC

SEQ ID NO: 202 - protein, 29 aa, HIV
LQARVKAVERYLKDQQLLGIWGCSGKLIC

SEQ ID NO: 203 - protein, 29 aa, HIV
LQARVTAVERYLKDQQLLGIWGCSGKLIC

SEQ ID NO: 204 - protein, 29 aa, HIV
LQARVSAVERYLKDQQLLGIWGCSGKLIC

SEQ ID NO: 205 - protein, 29 aa, HIV
LQARVFAVERYLKDQQLLGIWGCSGKLIC

SEQ ID NO: 206 - protein, 29 aa, HIV
LQARVHAVERYLKDQQLLGIWGCSGKLIC

SEQ ID NO: 207 - protein, 29 aa, HIV
LQARVMAVERYLKDQQLLGIWGCSGKLIC

SEQ ID NO: 208 - protein, 29 aa, HIV
LQARVPAVERYLKDQQLLGIWGCSGKLIC

SEQ ID NO: 209 - protein, 29 aa, HIV
LQARVVAVERYLKDQQLLGIWGCSGKLIC

SEQ ID NO: 210 - protein, 29 aa, HIV
LQARVQAVERYLKDQQLLGIWGCSGKLIC

SEQ ID NO: 211 - protein, 29 aa, HIV
LQARVYAVERYLKDQQLLGIWGCSGKLIC

SEQ ID NO: 212 - protein, 29 aa, HIV
LQARVLAVERALKDQQLLGIWGCSGKLIC

SEQ ID NO: 213 - protein, 29 aa, HIV
LQARVLAVERDLKDQQLLGIWGCSGKLIC

SEQ ID NO: 214 - protein, 29 aa, HIV
LQARVLAVERELKDQQLLGIWGCSGKLIC

SEQ ID NO: 215 - protein, 29 aa, HIV
LQARVLAVERFLKDQQLLGIWGCSGKLIC

SEQ ID NO: 216 - protein, 29 aa, HIV
LQARVLAVERGLKDQQLLGIWGCSGKLIC

SEQ ID NO: 217 - protein, 29 aa, HIV
LQARVLAVERHLKDQQLLGIWGCSGKLIC

SEQ ID NO: 218 - protein, 29 aa, HIV
LQARVLAVERILKDQQLLGIWGCSGKLIC

SEQ ID NO: 219 - protein, 29 aa, HIV
LQARVLAVERKLKDQQLLGIWGCSGKLIC

SEQ ID NO: 220 - protein, 29 aa, HIV
LQARVLAVERLLKDQQLLGIWGCSGKLIC

SEQ ID NO: 221 - protein, 29 aa, HIV
LQARVLAVERMLKDQQLLGIWGCSGKLIC

SEQ ID NO: 222 - protein, 29 aa, HIV
LQARVLAVERPLKDQQLLGIWGCSGKLIC

SEQ ID NO: 223 - protein, 29 aa, HIV
LQARVLAVERQLKDQQLLGIWGCSGKLIC

SEQ ID NO: 224 - protein, 29 aa, HIV
LQARVLAVERRLKDQQLLGIWGCSGKLIC

SEQ ID NO: 225 - protein, 29 aa, HIV
LQARVLAVERSLKDQQLLGIWGCSGKLIC

SEQ ID NO: 226 - protein, 29 aa, HIV
LQARVLAVERTLKDQQLLGIWGCSGKLIC

SEQ ID NO: 227 - protein, 29 aa, HIV
LQARVLAVERVLKDQQLLGIWGCSGKLIC

SEQ ID NO: 228 - protein, 29 aa, HIV
LQARVLAVERWLKDQQLLGIWGCSGKLIC

SEQ ID NO: 229 - protein, 870 aa, HIV
  misc_feature (86)..(86): Xaa can be any naturally occurring amino acid
MRAKGIQMNLHCLLKWGTMILGMILICSAAEQRWVTVYYGVPVWKDAETTLFCASDAKAYDTEVHNVWATHACVPTDPNPQEINLXNVTEEFNMWKNNMVEQMQEDIISLWDQSLKPCVKLTPLCVTLNCSHEVIFNSTLNNSTHSNKTLNNNTIEMKEEVRNCSYNVTTVLRDKKQKIYSLFYRLDVVPIGNNSDSEYILINCNTSTITQACPKVSFEPIPIHYCTPAGYAILKCNDKDFNGTGPCKNVSTVQCTHGIKPVVTTQLLLNGSLAENRTMIRSKNITDNKENIIVQLTEPVNITCIRPNNNTRKSVRIGPGQTFYATGEIIGDIRKAHCVVNKTEWNKNLKKVVVQLRTYFKNKTISFTNHSGGDPEVTTHSFNCGGEFFYCNTSELFNRTWNATDQLNSTEDSTALNETIILPCRIKQVINMWQTPGQAMYAPPIRGAIRCESNITGLILTRDGGNDNTSTNETFRPGGGDMRDNWRSELYKYKVVRIEPLGIAPTTAKRRVVQREKRAVGIGAVFIGFLGAAGSTMGAASITLTVQARQLLSGIVQQQSNLLRAIEAQQHMLKLTVWGIKQLQARVLALERYLKDQQLLGIWGCSGKLICTTNVPWNNTWSNKNKSEIWDKMTWLQWDKEISNYTQIIYNLIEESQTQQEINEQELLALDKWANLWNWFDISQWLWYIKIFIMIVGGLIGLRIVFAVLSIISRVRQGYSPLSFQTHTPNPEGLDRPGRTEEEGGEQGRDRSIRLVSGFLALAWDDLRSLCLFSYHRLRDLLSIVTRTVELLGHSSLKGLRLGWEGLKYLWNLLVYWSQELKISAVNLYDTIAIAVAGWTDRVIEIGQGICRAILNIPRRIRQGLERALL

SEQ ID NO: 230 - protein, 853 aa, HIV
MRVMGIQRNCQHLLTWGIMILGTIIFCSAVENLWVTVYYGVPVWRDADTTLFCASDAKAYETEKHNVWATHACVPTDPNPQEIHLDNVTEKFNMWKNNMVEQMHTDIISLWDQSLKPCVKLTPLCVTLHCTNVTSVNTTGDREGLKNCSFNMTTELRDKRQKVYSLFYRLDIVPINENQGSEYRLINCNTSAITQACPKVSFEPIPIHYCTPAGFAILKCKDEGFNGTGLCKNVSTVQCTHGIKPVVSTQLLLNGSLAEKNITIRSENITNNAKIIIVQLVQPVTIKCIRPNNNTRKSIRIGPGQAFYATGDIIGDIRQAHCNVTRSRWNKTLQEVAEKLRTYFGNKTIIFANSSGGDLEITTHSFNCGGEFFYCNTSGLFNSTWYVNSTWNDTDSTQESNDTITLPCRIKQIINMWQRAGQAMYAPPIPGVIKCESNITGLLLTRDGGKDNNVNETFRPGGGDMRDNWRSELYKYKVVEIEPLGVAPTRAKRRVVEREKRAVGIGAVFLGFLGAAGSTMGATSITLTVQARQLLSGIVQQQNNLLRAIEAQQHLLKLTVWGIKQLQARVLAVERYLRDQQLLGIWGCSGKLICTTNVPWNSSWSNKSLDEIWNNMTWLQWDKEINNYTQLIYRLIEESQNQQEKNEKELLELDKWANLWSWFDISNWLWYIKIFIIIVGGLIGLRIVFAVLSVINRVRQGYSPLSFQTHTPNPRGLDRPERIEEEDGEQGRGRSIRLVSGFLALAWDDLRSLCLFSYHRLRDFILIAARTVELLGHSSLKGLRLGWEGIKYLWNLLSYWGRELKISAINLVDTIAIAVAGWTDRVIEIAQRIGRAILHIPVRIRQGLERALL

SEQ ID NO: 231 - protein, 853 aa, HIV
MRVKGIQRNCQCLLTWGTMILGILIICRATENLWVTVYYGVPVWKDAKTTLFCASDAKAYETEKHNVWATHACVPTDPNPQEIHLENVTEDFNMWKNNMVEQMHTDIISLWDQSLKPCVKLTPLCVTLHCSNVTGANSTGTGGEEIKNCSYNITTELRDKRKKVYSLFYRLDIVQLSSNNSNSNEYRLINCNTSAITQACPKVSFEPIPIHYCAPAGFAILKCKDEEFNGTGPCKNVSTVQCTHGIKPVVSTQLLLNGSLAKEKVIIRSENITNNVKTIIVQLVKPVKINCTRPNNNTRTSIRIGPGQSFHATGDIIGDIRQAHCNVSRSEWNEALRQVVEQLRGHFGNKTIIFTNSSGGDIEITTHSFNCGGEFFYCDSSGLFNSTWDNTNITQPNSTGSNDTITLQCRIKQIINMWQRAGQAMYAPPIPGVISCVSNITGLLLTRDGGITSANETFRPGGGDMRDNWRSELYKYKVVKLEPLGVAPTRARRRVVEREKRAVGIGAVFIGFLGAAGSTMGAASMTLTVQARQLLSGIVQQQSNLLRAIEAQQHLLKLTVWGIKQLQARVLAVESYLRDQQLLGIWGCSGKLICTTTVPWNASWSNKSYSEIWENMTWLQWDKEISNYTNLIYGLIEESQNQQEKNEQDLLALDKWANLWSWFEISNWLWYIKIFIMIVGGLIGLRIVFAVLSIINRVRQGYSPLSFQTHTPNPGGPDRPGRIEEEDGELGRGRSIRLVNGFLALAWDDLRSLCLFSYHRLRDFILIAARTVELLGHSSLKGLRLGWEGLKYLWNLLVYWSRELRISATSLVDTIAIVVAGWTDRVIEIVQGIGRAILHIPRRIRQGLERALL

SEQ ID NO: 232 - protein, 857 aa, HIV
MRVMGIERNYPCWWTWGIMILGMIIICNTAENLWVTVYYGVPIWKDANTTLFCASDAKAYDTEVHNVWATHACVPTDPSPQELKMENVTEEFNMWKNNMVEQMHTDIISLWDQSLKPCVQLTPLCVTLDCSYNITNNITNSITNSSVNMREEIKNCSFNMTTELRDKNRKVYSLFYKLDVVQINNGNNSSNLYRLINCNTSALTQACPKVTFEPIPIHYCAPAGYAILKCNDKEFNGTGLCKNVSTVQCTHGIRPVVSTQLLLNGSLAEGKVMIRSENITNNVKNIIVQLNESVTINCTRPNNNTRRSVRIGPGQTFYATGDIIGDIRQAHCNVSGSQWNKTLHQVVEQLRKYWNNNTIIFNSSSGGDLEITTHSFNCAGEFFYCNTSGLFNSTWVNGTTSSMSNGTITLPCRIKQIINMWQRVGQAMYAPPIQGVIKCESNITGLILTRDGGVNSSDSETFRPGGGDMRDNWRSELYKYKVVKIEPLGVAPTKARRRVVEREKRAVTLGAVFIGFLGTAGSTMGAASITLTVQARKLLSGIVQQQSNLLRAIEAQQHLLKLTVWGIKQLQARVLAVERYLRDQQLLGIWGCSGKLICPTNVPWNSSWSNKSLDEIWENMTWLQWDKEISNYTIKIYELIEESQIQQERNEKDLLELDKWASLWNWFDISKWLWYIKIFIMIVGGLIGLRIVFAVLSVINRVRQGYSPLSFQTHTPNPRGLDRPGRIEEEGGEQDRGRSIRLVSGFLALAWDDLRNLCLFSYHRLRDFILIAARTVELLGHSSLKGLRLGWEGLKYLGNLLLYWGRELKISAINLLDTIAIAVAGWTDRVIETVQRLGRAILNIPRRIRQGFERALL

SEQ ID NO: 233 - protein, 847 aa, HIV
MGTQRNCQKWWEWGILVFGMIMMCKAADLWVTVYYGVPVWRDADTTLFCASDAKAYATEKHNVWATHACVPTDPNPQEVNLANVTEDFNMWKNNMVEQMHADIISLWDQSLKPCVKLTPLCVTLNCSNANTTNTNSTEEIKNCSYNMPTELKDKTQKVYSLFYELDVVLLNRSKNSSYSTYRLISCNTSVITQACPKVSFEPIPIHYCAPAGYAILKCKDKEFNGKGSCSNVSSVQCAHGIRPVASTQLLLNGSLAEGKVMIRSENITDNAKNIIVQFNKPVPINCTRPNNNTRKSIRFGPGQAFYTNNNIIGDIRQAHCNISITEWNATLKKVVEQLREHFPNKTIIFNSSSGGDLEITTHSFNCGGEFFYCNTTGLFNSTWENGTNKQNYTESNDTITLQCRIKQIINMWQRVGRAMYAPPIAGVIKCTSNITGMILTRDGGKNSINETFRPGGGDMRDNWRSELYKYKVVKIEPLGIAPTEARRRVVQREKRAVGLGAVFLGFLGAAGSTMGAASITLTVQARQLLTGIVQQQSNLLKAIEAQQQMLRLTVWGIKQLQARVLALERYLQDQQLLGIWGCSGKLICATDVRWNSSWSNKTQEQIWKNMTWLQWDKEISTYTDIIYMLLEESQNQQEKNEQDLLALDKWANLWNWFDITRWLWYIKIFIMIVGGLIGLRIVIAIISVVKRVRQGYSPLSFQIPTPNPEGLDRPGRIEEEGGEQGRDRSIRLVSGFLALAWDDLRSLCLFSYHRLRDCILIAARIVELVGHSSLKGLRLGWEGLKHLWNLLVYWGQELKTSAIRLLDTIAVAVAEWTDRVIEIGQRACRAIRNIPRRIRQGLERALL

SEQ ID NO: 234 - protein, 865 aa, HIV
MRVMGTQRNYQHLWRGGILILGMLIMCKATDLWVTVYYGVPVWKDADTILFCASDAKAYDTEVHNVWATHACVPTDPNPQEINLENVTENFNMWKNNMVEQMQEDIISLWDQSLKPCVKLTPLCVILNCSNANTSTHSNSSSTQSPINEEIKNCSYNTTTILRDKTQKVYSLFYRLDVVQLDESENKNTSGSNTLYRLINCNTSTITQACPKVTFEPIPIHYCAPAGFAILKCKDPRFNGTGSCKNVSSVQCTHGIKPVASTQLLLNGSLAEGGKIMIRSENITNNAKNIIVQFTKPVLITCIRPNNNTRKSIRFGPGQAFYTNEIIGDIRQAHCNINKTLWNDTLQKVAEQLREKFPKKTIIFTNSSGGDPEITTLSFNCAGEFFYCNTTGLFNGTWWNNGTWNGPYTPNNTNGSIILPCRIKQIINMWQRVGRAMYAPPIAGIIKCTSNITGIILTRDGGNNGTNETFRPGGGDMRDNWRSELYKYKVVKLEPLGVAPTRAKRRVVEREKRAVGLGAVFLGFLGAAGSTMGAASLTLTVQARQLLSGIVQQQSNLLQAIEAQQHLLKLTVWGIKQLQARVLAVERYLKDQQLLGIWGCSGKLICATTVPWNTSWSNKSQDEIWDNMTWLQWDKEISNYTNIIYRLLEESQNQQEKNEQDLLALDKWADLWSWFNISHWLWYIRIFIMIVGGLIGLRIVFAIITVVNRVRQGYSPVSFQIPTPSPEGPDRPRGTEEGGGEQGRDRSIRLVNGFFALAWDDLRSLCLFSYHRLRDCILIAARTVELLGHCSLKGLRLGWEGLKNLWNLLLYWGRELKNSAISLFDTIAVAVAEWTDRVIEIGQRAFRAILNIPRRIRQGLERALL

SEQ ID NO: 235 - protein, 856 aa, HIV
MRVKEKYQHLWRWGWRWGTMLLGMLMICSATEKLWVTVYYGVPVWKEATTTLFCASDAKAYDTEVHNVWATHACVPTDPNPQEVVLVNVTENFNMWKNDMVEQMHEDIISLWDQSLKPCVKLTPLCVSLKCTDLKNDTNTNSSSGRMIMEKGEIKNCSFNISTSIRGKVQKEYAFFYKLDIIPIDNDTTSYKLTSCNTSVITQACPKVSFEPIPIHYCAPAGFAILKCNNKTFNGTGPCTNVSTVQCTHGIRPVVSTQLLLNGSLAEEEVVIRSVNFTDNAKTIIVQLNTSVEINCTRPNNNTRKRIRIQRGPGRAFVTIGKIGNMRQAHCNISRAKWNNTLKQIASKLREQFGNNKTIIFKQSSGGDPEIVTHSFNCGGEFFYCNSTQLFNSTWFNSTWSTEGSNNTEGSDTITLPCRIKQIINMWQKVGKAMYAPPISGQIRCSSNITGLLLTRDGGNSNNESEIFRPGGGDMRDNWRSELYKYKVVKIEPLGVAPTKAKRRVVQREKRAVGIGALFLGFLGAAGSTMGAASMTLTVQARQLLSGIVQQQNNLLRAIEAQQHLLQLTVWGIKQLQARILAVERYLKDQQLLGIWGCSGKLICTTAVPWNASWSNKSLEQIWNHTTWMEWDREINNYTSLIHSLIEESQNQQEKNEQELLELDKWASLWNWFNITNWLWYIKLFIMIVGGLVGLRIVFAVLSIVNRVRQGYSPLSFQTHLPTPRGPDRPEGIEEEGGERDRDRSIRLVNGSLALIWDDLRSLCLFSYHRLRDLLLIVTRIVELLGRRGWEALKYWWNLLQYWSQELKNSAVSLLNATAIAVAEGTDRVIEVVQGACRAIRHIPRRIRQGLERILL

SEQ ID NO: 236 - protein, 855 aa, HIV
MKVKGIRKNYQLLWRWGIMLLGTLMICSATENLWVTVYYGVPVWKEATTTLFCASDAKAYETEVHNVWATHACVPTDPNPQELVLENVTENFNMWKNNMVEQMHEDIISLWDESLKPCVKLTPLCVTLNCTDANITSSNNITGSNNNSNLEQMAREISNCSFNITTTIKNKRQREFALLSKLDIVPIDNDSYSYMLINCNTSVITQACPKVSFQPIPIHYCTPAGFAILKCNDKKFNGTGPCKNVSTVQCTHGIRPVVSTQLLLNGSLAEEDVVIRSKNFTDNTKTIIVQLKESVEINCTRPNNNTRKSIHIGPGRAFYATGEIIGDIRQAHCNLSRAKWNDTLNQIVGKLRELYKNKTIVFNSSSGGDPEIVMHSFNCRGEFFYCNTTQLFNSTWDVNATGNGTTEPNSTITLPCRIKQIINRWQEVGKAMYAPPIAGQISCSSNITGLLLTRDGGGGENNSTEIFRPGGGDMRDNWRSELYKYKVVKIEPLGVAPTKAKRRVVQREKRAITLGAMFLGFLGAAGSTMGAASMALTVQARQLLSGIVQQQNNLLRAIEAQQHLLQLTVWGIKQLQARVLAIERYLQDQQLLGIWGCSGKLICTTTVPWNASWSNKSLDQIWENMTWMQWEREIDNYTSLIYTLIEDSQKQQEKNEQELLALDTWASLWNWFSITNWLWYIKIFIMIVGGLVGLRIVFIVLSIVNRVRKGYSPLSFQTHLPAPRGPDRPEGIEEEGGERDRDGSGPLVNGFLAIIWVDLRSLCLFSYHRLRDLLLIVVRIVELLGRRGWEALKYWWNLLQYWIQELRGSAVSLFNAIAIAVAEGTDRVIETIQRAFRAILHIPRRIRQGLERILL

SEQ ID NO: 237 - protein, 849 aa, HIV
  misc_feature (93)..(93): Xaa can be any naturally occurring amino acid
MRVKEIRKNCQHLWRWGILLLGILMISSAAENLWVTVYYGVPVWKEATTTLFCASDAKAYDTEVHNVWATHACVPTDPNPQEVVLVNVTENFXMWTNNMAEQMHEDIISLWDQSLKPCVKLTPLCVTLNCTDLRNTTNTNSTAEEMEAKGEMKNCSFNITTSIRNKLQKEYALFYKLDIVPINNDNTSYRLISCNTSVITQACPKVSFEPIPIHYCAPAGFAILKCNDKKFSGNGPCKNVSTVQCTHGIKPVVSTQLLLNGSLAEEEVVIRSENFTDNAKTIIVQLKEPVEINCTRPNNYTRKRITMGPGRVYYTTGEIIGDIRRAHCNISSTKWNNTLGQIVKKLKEQFNNNTIVFKKSSGGDPEIVMHSFICGGEFFFCNSTKLFNSTWNSTEGNDDGEERNITLPCRIKQIVNMWQEVGKAMYAPPIGGQIRCTSNITGLLLTRDGGNQNGTNETEIFRPGGGNMRDNWRSELYKYKVVKIEPLGVAPTKAKRRVVQREKRAVGIGAVFLGFLGAAGSTMGAASVTLTVQARLLLSGIVQQQNNLLRAIEAQQHLLQLTVWGIKQLQARVLAVERYLKDQQLLGIWGCSGKLICTTAVPWNASWSNKSLDEIWNNMTWMQWEREINNYTGLIYTLIEESQNQQEKNELDLLQLDKWASLWNWFDITNWLWYIKIFIMIVGGLVGLRIIFTVLSIVNRVRQGYSPLSFQTHLPAPRGPDRPGGIEEEGGERDRDTSGRLVDGFLAIFWVDLRNLCLFSYHRLRDLLLIVTRIVELLGRRGWEALKYWWNLLQYWSQELKNSAVSLLNATAIAVAEGTDRVIEVLQRVYRAILNIPTRIRQGLERALL

SEQ ID NO: 238 - protein, 856 aa, HIV
MRVKGIRRNCQHSWRWGTTLTMLLGILMICRAAEQLWVTVYYGVPVWREAKTTLFCASDAKAYDTEVHNVWATHACVPTDPNPQELVLVNVTENFNAWENNMVEQMHEDIISLWDQSLKPCVKLTPLCVTLNCNDLNTTTSNTTGTEGLTMDKGEMKNCSFNITTDISNKKQKQYALFYKLDVVQMNNNNNSYRLISCNTSVITQACPKVSFEPIPIYYCAPAGFAILKCNDKSFSGKGECKNVSTVQCTHGIRPVVSTQLLLNGSLAEEDVIIRSDNFTDNAKTIIVQLNETVDIHCIRPNNNTRKRITMGPGKVYYTTGQIIGDIRQAHCNLSEAKWNNTLRRVVRKLREKFNKTIVFNQSSGGDPEIVMHTFNCGGEFFYCNSTKLFNSIWDNNKDSTKTNEPNDGKNITLPCRIKQIINMWQGVGKAMYAPPIRGQIRCTSNITGLLLTRDGGKNNGTNGTEVFRPGGGNMKDNWRSELYKYKVVKIEPLGVAPTTAKRRVVQREKRAVTLGALFLGFLGAAGSTMGAASMTLTVQARLLLSGIVQQQNNLLRAIEAQQHLLQLTVWGIKQLQARVLAVERYLEDQQLLGIWGCSGKLICTTAVPWNASWSNKSRSEIWNNMTWMQWDKEIHNYTNLIYTLIGESQIQQEKNEQELLGLDKWASLWNWFDITKWLWYIKIFIMIVGGLIGLRIVFTVLSIMNRVRQGYSPLSFQTRLPTQRGPDRPEGTEEEGGERDRDRSGPLVDGFLAIIWVDLRSLCLFLYHRLRDLLLIVTRTLELLGRRGWEILKYWWNLLQYWSQELKNSAVSLLNATAIAVAEGTDRVIEIVQRTFRAILHIPVRIRQGLERALL

SEQ ID NO: 239 - protein, 856 aa, HIV
MRVEGIQRNWKQWWIWGILGFWMVMIYNVRGNLWVTVYYGVPVWKEAKTTLFCASDAKAYDAEVHNVWATHACVPTDPNPQEMVLENVTENFNMWENDMVEQMHQDIISLWDQSLKPCVKLTPLCVTLHCSNRTIDYNNRTDNMGGEIKNCSFNMTTEVRDKREKVHALFYRLDIVPLKNESSNTSGDYRLINCNTSAITQACPKVSFDPIPIHYCAPAGYAILKCNNKTFNGTGPCNNVSTIQCTHGTKPVVSTQLLLNGSLAEEEIIIRSKNLTDNVKTIIVHLNESVEINCTRPNNNTRKSIRIGPGQAFYATGEIIGDIRQAHCNISRTAWNKTLQEVGKKLAEHFPNKAIKFAKHSGGDLEITTHSFNCRGEFFYCNTSSLFNSTYTPNSTENITGTENSIITIPCRIKQIINMWQGVGRAMYAPPIEGILTCRSNITGLLLTRDGGTGMHDTEIFRPEGGDMRDNWRSELYKYKVVEIKPLGIAPTKAKRRVVEREKRAVGIGAVFLGFLGAAGSTMGAASITLTVQVRQLLSGIVQQQSNLLRAIEAQQHMLQLTVWGIKQLQTRVLAIERYLRDQQLLGIWGCSGKLICTTAVPWNSSWSNRSQEDIWNNMTWMQWDREISNYTNTIYRLLEDSQNQQEKNEQDLLALDKWQNLWTWFGITNWLWYIKIFIKIVGGLIGLRIIFAVLSIVNRVRQGYSPLSFQTLTPNPRGPDRLGGIEEEGGEQDRDRSIRLVSGFLALAWDDLRSLCLFSYHRLRDLILIAARAVELLGRSSLRGIQRGWEILKYLGGLVQYWSLELKKSAISLFDTIAIAVAEGTDRIIEVIQGIWRAICNIPRRIRQGFEAALQ

SEQ ID NO: 240 - protein, 851 aa, HIV
MKVMGIQRNCQQWWIWGILGFWMLMICNGMGNLWVTVYYGVPVWKDASPTLFCASDAKAYDTEVHNVWGTFACVPTDPSPQELGLENVTENFNMWKNDMVEQMHQDIISLWDQGLKPCVKLTPLCVTLNCNAIKNNTKVTNNSINSANDEMKNCSFNITTELRDKKRKAYALFYKLDIVPLNNGSTDYRLINCNTSTITQACPKVSLDPIPIHYCAPAGYAILKCRDKTFTGTGPCHNVSTVQCTHGIKPVVSTQLLLNGSIAEGETIIRFENLTNNAKIIIVQLNESVEITCTRPSNNTRESIRIGPGQTFYATGDIIGDIRQAHCNISEEKWNKTLQKVKEKLQKHFPNKTIEFKPSSGGDLEITTHSFNCGGEFFYCNTSNLFNSTKLELFNSSTNLNITLQCRIKQIINMWQGVGRAMYAPPIEGIIMCRSNITGLLLTRDGAKEPHSTKEIFRPEGGDMRDNWRSELYKYKVVEIKPLGVAPTKPKRRVVEREKRAALGALFLGFLGAAGSTMGAASITLTVQARQLLSGIVQQQSNLLKAIEAQQHMLQLTVWGIKQLQTRVLAIERHLRDQQLLGIWGCSGKLICTTAVPWNSSWSNKSQEEIWDNMTWMQWDREISNYTDIIYNLLEVSQNQQDKNEKDLLALDKWENLWNWFNITNWLWYIKIFIMIVGGVIGLRIIFAVLSIVNRVRQGYSPLSFQTLIPHPRGPDRLGGIEEEGGEQGRDRSIRLVNGFLAIFWDDLRSLCLFSYHRLRDLILIAARTVELLGRSSLKGLQRGWETLKYLGSLVQYWGLELKKSAINLLNTTAIVVGEGTDRFIELIQRIWRAFCNIPRRIRQGLEAALQ

SEQ ID NO: 241 - protein, 870 aa, HIV
MRVRGILRNYQQWWIWGVLGFWMLMICNVVGNLWVTVYYGVPVWKEANTTLFCASDAKAYEKEVHNVWATHACVPTDPNPQEIVMENVTENFNMWKNDMVNQMHEDVISLWDQSLKPCVKLTPLCVTLECRNVNSTGNGTHSKTYNESMKEIKNCSFNATTVIKDKKQTVYALFYKLDIVPLDNEEQENDSNSSGYYRLINCNTSALTQACPKVTFDPIPIHYCAPAGYAILKCNNKTFNGTGPCHNVSTVQCTHGIKPVVSTQLLLNGSLAEGGIIIRSENLTNNVKTIIVHLNQPVEIMCTRPDNNTRKSIRIGPGQTFYATGDIIGDIRQAHCNISEDKWNETLQNVSKKLAEHFPNKTIIFNSSSGGDLEITTHSFNCRGEFFYCNTSGLFNRTYMPNDTKSNSSSNPNANITIPCRIKQIINMWQEVGRAMYAPPIEGKITCRSNITGLLLVRDGGEDKNNTETNKTETFRPGGGDMRDNWRSELYKYKVVEVKPLGVAPTTAKRRVVEREKRAVGIGAVFLGFLGAAGSTMGAASITLTVQARQLLSGIVQQQSNLLRAIEAQQHLLQLTVWGIKQLQTRVLAIERYLKDQQLLGIWGCSGKLICTTAVPWNSSWSNRTQKEIWDNMTWMQWDREINNYTNTIYRLLEESQNQQEENEKDLLALDSWKNLWNWFDITKWLWYIKIFIIIVGGLIGLRIIFAVISIVNRVRQGYSPLSFQTLTPNPGGPDRLGRIEEEGGEQDKDRSIRLVSGFLALFWDDLRNLCLFSYHRLRDFILVAARVLELLGRRSLRGLQRGWEALKYLGSLVQYWGLELKKSAINLLDRIAIAVAEGTDRILELVQRICRAIRNIPRRIRQGFEAALQ

SEQ ID NO: 242 - protein, 846 aa, HIV
MRVRGILRNWPQWWIWGILGFWMIIICRGEENSWVTVYYGVPVWTEAKTTLFCASDAKAYEKEVHNVWATHACVPTDPSPQELVLENVTESFNMWENDMVDQMHEDIIGLWDESLKPCVKLTPLCVTLNCNTTSHNNSSPSPMTNCSFNATTELRDKTQKVNALFYRSDIVPLEKNSSEYILINCNTSTITQACPKVSFDPIPIHYCAPAGYAILKCNNKTFNGTGPCSNVSTVQCTHGIKPVVSTQLLLNGSLAEGEIIIRSENLTDNAKTIIVHLNKSVAIVCTRPNNNTRKSIRIGPGQVFYTNEIIGNIRQAHCNISRELWNNTLEQVKKKLKEHFQNKTIEFQPPAGGDLEVTTHSFNCRGEFFYCNTSNLFNITASNASDANNNTITLPCKIKQIINMWQEVGRAMYAPPIAGNITCNSSITGLLLTRDGGNNNDTGNNNDTEIFRPGGGNMKDNWRSELYKYKVVEIKPLGIAPTKAKRRVVEREKRAVGLGAVLLGFLGTAGSTMGAASITLTVQARQLLSGIVQQQSNLLRAIEAQQHMLQLTVWGIKQLQARVLAIERYLKDQQLLGLWGCSGKLICTTAVHWNSSWSNKSQDYIWGNMTWMQWDREINNYTDIIYTLLEESQSQQEKNEKDLLALDSWNNLWNWFSITKWLWYIKIFIMIVGGLIGLRIILGVLSIVKRVRQGYSPLSFQTLPPNPRGPDRLRGIEEEGGEQDKDRSIRLVSGFLALVWEDLRSLCLFSYHRLRDFILIAGRAAELLGRSSLRGLQTGWQALKYLGSLVQYWGLELKKSAINLFDTTAIVVAEGTDRLIEGLQGIGRAIYNIPRRIRQGFEAALL

SEQ ID NO: 243 - protein, 853 aa, HIV
MRARGIERNCQNWWKWGIMLLGILMTCSAADNLWVTVYYGVPVWKEATTTLFCASDAKSYETEAHNIWATHACVPTDPNPQEIALENVTENFNMWKNNMVEQMHEDIISLWDQSLKPCVKLTPLCVTLNCSDELRNNGTMGNNVTTEEKGMKNCSFNVTTVLKDKKQQVYALFYRLDIVPIDNDSSTNSTNYRLINCNTSAITQACPKVSFEPIPIHYCAPAGFAILKCRDKKFNGTGPCTNVSTVQCTHGIRPVVSTQLLLNGSLAEEEVIIRSENLTNNAKNIIAHLNESVKITCARPYQNTRQRTPIGLGQSLYTTRSRSIIGQAHCNISRAQWSKTLQQVARKLGTLLNKTIIKFKPSSGGDPEITTHSFNCGGEFFYCNTSGLFNSTWNISAWNNITESNNSTNTNITLQCRIKQIIKMVAGRKAIYAPPIERNILCSSNITGLLLTRDGGINNSTNETFRPGGGDMRDNWRSELYKYKVVQIEPLGVAPTRAKRRVVEREKRAIGLGAMFLGFLGAAGSTMGARSVTLTVQARQLMSGIVQQQNNLLRAIEAQQHLLQLTVWGIKQLQARILAVERYLKDQQLLGIWGCSGKHICTTNVPWNSSWSNRSLNEIWQNMTWMEWEREIDNYTGLIYSLIEESQTQQEKNEKELLELDKWASLWNWFSITQWLWYIKIFIMIIGGLIGLRIVFAVLSLVNRVRQGYSPLSFQTLLPAPRGPDRPEGTEEEGGERGRDRSVRLLNGFSALIWDDLRSLCLFSYHRLRDLILIAVRIVELLGRRGWDILKYLWNLLQYWSQELRNSASSLFDAIAIAVAEGTDRVIEIIQRACRAVLNIPRRIRQGLERSLL

SEQ ID NO: 244 - protein, 848 aa, HIV
MRVMGIERNYQHSWKWGTMLLGMLLMTYSAAGNLWVTVYYGVPVWKEAKTTLFCASDAKSYKTEAHNIWATHACVPTDPDPQELVLDNVTENFNMWKNNMVEQMHEDIISLWDQSLKPCVKLTPLCVTLNCSNPNITNNSSANNISIVKKMKNCSFNTTTILKDKQKQEYALFYILDIVGIDNSSNRLINCTTSVITQACPKITSEPIPIHYCAPAGFAILKCNDKLFNGTGPCRNVSAVQCTHGIKPVVSTQLLLNGSLAEEVMVRSENLTDNAKNIIVQLNNTINITCVRPNSNTRKSINLGPGQAFYATYATNIIGNIRQAHCNLSATQWNKTLHQVAQKLGKLLNKTKINFNSSSGGDPEITTHSFVCGGEFFYCNTSGLFNGTWDNGTWTWNTSAVPNETITIPCRIKQIINMWQGVGRAMYAPPIEGLIKCSSNITGLLLTRDGGNTSDSAETFRPGGGDMRDNWRSELYKYKVVKIEPLGVAPTRAKRRVVEREKRAIGLGAMFLGFLGAAGSTMGAASVTLTVQARQLLSGIVQQQNNLLRAIEAQQHLLQLTVWGIKQLQARVLAVERYLKDQQLLGIWGCSGKHICTTNVPWNSSWSNRSLDDIWQNMTWMQWEREIENYTGVIYSLIEESQIQQEKNEKELLELDKWASLWNWFSISNWLWYIRIFIMIVGGLIGLRIVFAVLSMVRRVRQGYSPLSFQTLLPAPRGPDRPEGIEEEGGEQDRGRSIRLVNGFSALIWDDLRNLCLFSYHRLRDLILIAARIVDLLGRRGWEALKYLWNLLRYWSQELKNSAINLLNTTAIAVAEGTDRVIEIIQRAGRAVLHIPRRIRQGFERALL

SEQ ID NO: 245 - protein, 852 aa, HIV
MRVMETQRNYQHLWRWGIMLLGMWMTYSVAEQLWVTIYYGVPVWREANTTLFCASDAKSFDTEAHNIWATHACVPTDPNPQEMDLVNVSENFNMWKNNMVEQMHEDIISLWEESLKPCVKLTPLCVTLHCSDANTTNSGNGTNTTDPRLIEKGEMKNCSFNITTEIRDKRKQVQALFYKLDVVPIDKKNNNSYTLMHCNTSAIKQACPKVSFEPIPIHYCAPAGFAILKCKDKKFNGTGPCKKVSTVQCTHGIRPVVSTQLLLNGSLAGEEIIIRSENLTNNVKTIIVQLNETVKINCTRPNNNTRKGIRIGPGQTFFTAEVTGDIRKAYCNISGAEWDKTLQQVATKLGDLLNKTIINFSPSSGGDPEITTHSFNCGGEFFYCNTSLLFNTTWIKGTQNNTETNNSTITIPCRIKQIINMWQGVGKAMYAPPIAGLIRCTSNITGLLLTRDGGNVNNSREEIFRPGGGDMRDNWRSELYKYKVVRIEPIGVAPTRAKRRVVEREKRAIGLGAMFLGFLGAAGSTMGAASLTLTVQARQLLSGIVQQQNNLLRAIEAQQHLLQLTVWGIKQLQARVLAVESYLKDQQLLGIWGCSGKHICTTAVPWNSSWSNKSLDDIWNNMTWMEWEKEIDNYTGVIYSLIEESQVQQEKNEKELLELDKWASLWNWFSITKWLWYIKLFIMIVGGLIGLKIVFTVFSLVNRVRQGYSPLSLQTLLPASRGPDRPEGIEEEGGEQGRGRSIRLVNGFSALIWDDLRNLCLFSYRHLRDLILIATRIVGLLGHRGWEAIKYLWNLLQYWIQELKNSAISLLNVTAIAVAEGTDRIIEIIQRAFRAVLHIPRRVRQGLERALL

SEQ ID NO: 246 - protein, 844 aa, HIV
MRVRETKRNYQHLWKWGTMLLGMLMICSVTGKSWVTVYYGVPVWKEATTTLFCASDAKAYKAEAHNIWATHACVPTDPNPQEIKLENVTENFNMWKNNMVEQMHEDIISLWDQSLKPCVKLTPLCVTLNCTNWVTDTTNTTGMANCSFNITTEIRDKKKQVQALFYKLDVVKINDNDSDNTSYRLINCNTSAITQACPKMTFEPIPIHYCAPAGFAILKCNEKKFNGTGPCKNVSTVQCTHGIKPVVSTQLLLNGSLAEEEIIIRSENLTNNAKIIIVQLNESVPINCIRPYNNTRQSTRIGPGQALFTTKVIGDIRQAHCNISGAGWNKTLQQVAEKLGNLLNQTTIIFKPSSGGDPEITTHSFNCGGEFFYCNTTRLFNSTWKRNNSEWRSDNTPDETITLQCRIKQIINMWQEVGKAMYAPPIEGFINCSSNITGLLLTRDGGAINSSQNETFRPGGGDMRNNWRSELYKYKVVKLEPIGLAPTAAKRRVVEREKRAIGLGALFLGFLGTAGSTMGAVSLTLTVQARQVLSGIVQQQNNLLRAIEAQQHLLQLTVWGIKQLQARILAVESYLKDQQLLGIWGCSGKHICTTNVPWNSSWSNRSVDEIWNNMTWMEWEREIDNYTELVYSLLEVSQIQQEKNEQELLKLDTWASLWNWFSITQWLWYIKIFIMIVGGLIGLRIVFAVLSVVNRVRQGYSPLSFQTLLPAPREPDRPEGIEEEGGERDRGRSIRLVNGLSALIWDDLRNLCLFSYHRLRDLILIAARIVELLGRRGWEAIKYLWNLLQYWIQELKNSAVSLFNTIAIAVAEGTDRAIELVQRAVRAILNIPVRIRQGLERALL

SEQ ID NO: 247 - protein, 832 aa, HIV
MRVRGMQRNWQHLGKWGLLFLGILIICNAADNLWVTVYYGVPVWKEATTTLFCASDAKAYEREAHNVWATHACVPTDPNPQEVFLKNVTENFDMWKNNMVEQMHTDIISLWDQSLKPCVKLTPLCVTLNCTNATNNSQEKPGAMQNCSFNMTTEVRDKKLKLSALFYRLDIVPIGNNNSSEYRLINCNTSTITQACPKVSWDPIPIHYCAPAGYAILKCNDKRFNGTGPCKNVSTVQCTHGIKPVVSTQLLLNGSLAEEGIVIRSQNISNNAKTIIVHLNESVQINCTRPNNNTRKGIHLGPGQTFYATGAIIGDIRKAHCNISGTQWNNTLEYVKAELKSHFPNNTAIKFNQSSGGDLEITMHSFNCRGEFFYCDTSGLFNDTGSNNGTITLPCRIKQIVNMWQGVGRAMYTSPIAGNITCNSNITGLLLTRDGGNESNIETFRPEGGNMKDNWRSELYKYKVVEIEPLGVAPTKAKRQVVQREKRAAGLGALFLGFLGDSREHMGAASITLTVQARQLLSGIVQQQNNLLRAIEAQQHLLQLTVWGIKQLQARVLAVERYLKDQQLLGIWGCSGKLICTTNVPWNSSWSNKSQEEIWNNMTWMEWEKEISNYSNIIYKLIEESQNQQEKNEQELLALDKWASLWNWFDISNWLWYIKIFIMIVGGLIGLRIVFAVLSIVNRVRKGYSPLSLQTLIPSPRGPDRPEGIEEGGGEQGKDRSVRLVTGFLALAWDDLRNLCLFSYRHLRDFILIAARIVDRGLRRGWEALKYLGNLTRYWSQELKNSAISLFNTTAIVVAEGTDRIIEVLQRAGRAVLNIPRRIRQGAERALL

SEQ ID NO: 248 - protein, 846 aa, HIV
MRVRGMQRNWQHLGKWGLLFLGTLIICNAAENLWVTVYYGVPVWKEATTTLFCASDAKSYEKEAHNVWATHACVPTDPNPQEVVLENVTERFNMWENNMVEQMHTDIISLWDQSLKPCVKLTPLCVTLDCRNIATNGTNDTIAINDTLKEDPEAIQNCSFNTTTEIRDKQLKVHALFYKLDIVQINKDDNRTYRLINCDASTITQACPKVSWDPIPIHYCAPAGYAILKCNEKNFTGTGSCKNVSTVQCTHGIKPVVSTQLLLNGSLAEGEIVIRSQNISDNAKTIIVHLNESVQINCTRPNNNTRKRISLGPGRVFYTTGEIIGDIRKAHCNVSGTQWRNTLAKVKAKLGSYFPNATIKFNSSSGGDLEITRHNFNCMGEFFYCNTDELFNDTKFNDTGFNGTITLPCRIKQIVNMWQEVGRAMYANPIAGNITCNSNITGLLLTRDGGLNSTNETFRPGGGNMKDNWRSELYKYKVVEIEPLGVAPTKAKRQVVKRERRAVGLGALFLGFLGAAGSTMGAASITLTVQARQLLSGIVQQQSNLLRAIEAQQHLLQLTVWGIKQLQARVLAVERYLKDQQLLGLWGCSGKLICTTNVPWNSSWSNKSLEEIWGNMTWMEWEKEVSNYSKEIYRLIEDSQNQQEKNEQELLALDKWASLWNWFDITQWLWYIKIFIMIVGGLIGLRIVFTVLSIVNRVRKGYSPLSFQTHIPSPREPDRPEGIEEGGGEQGKDRSVRLVTGFLALAWDDLRNLCLFSYRHLRDFILIAARIVDRGLKRGWEALKYLGNLTQYWGQELKNSAISLLNATAIAVAEWTDRVIEALQRAGRAILNIPRRIRQGLERALL

SEQ ID NO: 249 - protein, 842 aa, HIV
MRVRGMQRNWQHLGKWGLLFLGMLIICKAADDLWVTIYYGVPVWKEANTTLFCASDAKSYEKEVHNVWATHACVPTDPNPQEVALNVTENFNMWENDMVEQMHKDIISLWDQSLKPCVKLTPLCVTLNCTNATTTNDTLSDQSSTLKEEPGAIQNCSFNMTTEVEDKKQKVHALFYRLDIEPISNNNSREEYRLITCNTSTITQACPKVSWDPIPIHYCAPAGYAILKCKDKRFNGTGPCRNVSTVQCTHGIRPVVSTQLLLNGSLSEGGIIIRSQNLSDNAKTIIVHLNESVQINCTRPNNNTRKSIRIGPGQSFYATGEIIGDIRKAHCNISGEQWNKTLDRVKAELKLHFNKTIQFNSSSGGDLEITMHSFNCRGEFFYCNTSLLFNNTVPNNGTITLPCRIKQFVNMWQEVGRAMYAAPIAGNITCNSNITGLLLTRDGGQSNNSDSETFRPGGGDMKDNWRSELYKYKVVEIEPLGVAPTRPKRPVVRRERRAVAIGAVFLGFLSAAGSTMGAASLTLTVQARQLLSGIVQQQNNLLQAIEAQQHMLQLTVWGIKQLQARVLAVERYLKDQQLLGLWGCSGKLICTTNVPWNSSWSNKSQDEIWNNMTWMQWEKEISNYSKTIYMLIEKSQSQQERNEQELLELDKWDSLWSWFDITNWLWYIKIFIMIVGGLIGLRIVFAVLSIVNRVRKGYSPLSLQTLIPAPTEPDRPEGIEEGGGEQGKDRSVRLVNGFLALVWDDLRNLCLFSYRHLRDFILIAARIVDRGLRRGWEALKYLGNIIQYWSQELKNSAISLFNTTAIVVAEGTDRVIEALQRAVRAVLNIPRRIRQRVERALI

SEQ ID NO: 250 - protein, 843 aa, HIV
MRVRVMQRNWQHLGKWGLLFLGILIICSAADNLWVTVYYGVPVWKEATTTLFCASDAKGYEREVHNVWATHACVPTDPNPQEIWLKNVTENFDMWKNNMVEQMHEDIISLWDQSLKPCVKLTPLCVTLHCSDVNITSNATTTNDTSTPEESGAIQNCSFNMTTEVKDKKLRVNALFYKLDIIPINNSSSSDYRLINCNTSTIKQACPKVSWDPIPIHYCAPAGYAILKCRDPRFNGTGPCKNVSTVQCTHGIRPVVSTQLLLNGSLAEEDIIIRSQNISDNAKTIIVHLNESVQINCTRPNNNTRKSIHLGPGQAFYATGDIIGDIKKAYCEINGTQWSKTKTQVQEKLRALFNKTIKFNQSSGGDLEITMHSFNCRGEFFYCDTSGLFNESEKYNGTIILPCKIKQIINMWQGVGQAMYSAPIAGRINCNSTITGLLLTRDGGQSNDTNRTETFRPEGGNMKDNWRNELYKYKVVEIEPLGVAPTKARRRVVQRERRAVGIGALFLRFLGAAGSNIGAASITLTVQARQLLSGIVQQQNNLLRAIEAQQHLLQLTVWGIKQLQARVLAVERYLKDQQLLGIWGCSGKLICTTNVPWNTSWSNKSHDEIWNNMTWMQWEKEINNYSNTIYRLIEESQNQQEKNEQELLALDKWASLWSWFDISNWLWYIKIFIMIVGGMIGLRIVFAVLSIVNRVRKGYSPLSLQTLIPSPRGPDRPEGIEEGGGEQDRNRSVRLVNGFLSLVWDDLRNLCLFSYRHLRDFILIAARTVDRGLTRGWETLKYLWNLAQYWSQELKNSAISLLNTTAIVVAEGTDRVIEVLQRAGRAVLNVPRRIRQGLERSLL

SEQ ID NO: 251 - protein, 845 aa, HIV
MRVRGMQRNWQHLGKWGFLFLGILIICNAADNLWVTVYYGVPVWKEATTTLFCASDAKAYEKEAHNVWATHACVPTDPDPQEIFLDNVTENFNMWKNNMVDQMHEDIISLWDQSLKPCVKITPLCVTLHCSDVNITANNTNQPNNITLEEQGEIKNCSFNITTEIKDKRKNEFATFYKHDIVPIEKNTTSYRLTSCNTSTVTQACPKVSFDPIPIYYCAPAGYAILKCNDKRFNGKGLCTNVSTVQCTHGIKPVVSTQLLLNGSLAEKNIIIRSENITDNAKTIIVQFNESVKINCTRPNNNTRKSIRIGPGQVFYATGEIIGDIRKAHCTINGTLWNATLNRVAAEVKNLTNITIKFEPSSGGDLEVTTHSFSCGGEFFYCDTTALFNTTLLNTTMDNNGTIIIPCRIKQIVNVWQRVGRAMYAPPIAGKIQCNSNITGLLLTRDGGSKANNTDILRPIGGEMRDNWRSELYKYKVVQIQPLGIAPSRAKRQVVKRERRAVGIGAVFLGFLGAAGSTMGAASITLTVQARQLLSGIVQQQNNLLKAIEAQQHLLQLTVWGIKQLQARILAVERYLKDQQLLGIWGCSGKLICTTNVPWNSSWSNKSQEEIWGNMTWMQWEKEIDNYTDTIYRLIEEAQNQQEKNEQDLLALDKWDSLWSWFTITNWLWYIRIFIMVVGGLIGLRIVFAVLSIINRVRQGYSPLSLQTLIPSPRGPDRPGGIEEEGGEQDKDRSVRLVSGFLALAWDDLRSLCLFSYRHLRDFILIAARTVDRGLKGGWEVLKYLWNLAQYWGRELKISAISLLNTTAIVVAEGTDRVIEILQRAGRAILHIPRRIRQGFERALL

SEQ ID NO: 252 - protein, 843 aa, HIV
MRVREMQRNWQHLGKWGLLFLGILIICNANATDDLWVTVYYGVPVWKEPTTTLFCASDAKAYDPEVHNVWATYACVPTDPNPQELVLGNVTENFNMWENNMVDQMHLDIISLWDQSLKPCVKSTPLCVTLNCTDVNITMSDINGTSLKEDQGEIKNCSFNVTTELKDKKRKQQALFYRLDVEPIKNSSNIYKLISCNMSTVTQACPKVSFDPIPIHYCAPAGYAILKCNDKRFNGTGPCEKVSTVQCTHGIRPVVSTQLLLNGSLAQEDIIIRSKNITDNTKNIIVQFNRSVIIDCRRPNNNTRKGIRIGPGQTFFATGEIIGDIRKAYCNINRTLWNETLKNVSGEFKKHFNFSVAFNSSSGGDVEITTHSFNCRGEFFYYNTSGLFNETEVANNTNENITLPCRIRQFVNMWQRIGRAMYAPPIEGEIQCTSNITGLLLTRDGSKDIDGKEILRPIGGDMRDNWRSELYKYKVVRIEPVGVAPTKAKRRVVQRAKRAVGMGAVLFGFLGAAGSTMGAAAITLTAQARQLLSGIVQQQSNLLKAIEAQQHLLQLTVWGIKQLQARILAVERYLKDQQLLGIWGCSGKLICTTNVRWNSSWSNKSYDDIWDNMTWMQWEKEIDNYTKTIYSLIEDAQNQQERNEQELLALDKWDSLWSWFSITNWLWYIKIFIMIVGGLIGLRIVFAVLSVVNRVRQGYSPLSLQTLIPNPRGPDRPGGIEEEGGEPDRDRSMRLVSGFLPLTWDDLRSLCSFSYRHLRDLLLIAARTVDRGVKGGWEALKYLWNLTQHWGRELKNSAISLFDTIAIAVAEGTDRIIEVLQRAGRAVLHIPRRIRQGAERFLL

SEQ ID NO: 253 - protein, 850 aa, HIV
MRVREMQRNWQHLGRWGLLFLGILIICSAADKLWVTVYYGVPVWKEATTTLFCASDAKAYEREVHNVWATYACVPTDPSPQELVLGNVSEKFNMWKNNMVDQMHEDIISLWDESLKPCVKLTPLCVTLNCTKAIINVTSSNNTTLAPNVTISEEMKNCSFNITTEIRDKQKKEYALFYKLDVVQINNSNTSYRLINCNTSTLTQACPKVSFDPIPIHYCAPAGFAILKCNNKTFNGTGLCRNVSTVQCTHGIKPVVSTQLLLNGSLAEEKMIIRSENISDNTKTIIVQFKNPVKINCTRPNNNTRRSIHIGPGRAFYATGEIIGDTRKAHCNISEKQWYDTLIKIATEFKDQYNKTVGFQPSAGGDLEITTHSFNCRGEFFYCNTTILFNHTRVNDILSNNHTRENDTITLPCRIKQIVNMWQRVGQAMYAPPIAGKIQCNSNITGLLLTIDGGEGNESETLRPGGGDMRDNWRSELYKYKVVKIEPLGVAPTKAKRQVVQREKRAVGMGAMFLGFLGAAGSTMGAASITLTVQARNLLSGIVQQQSNLLKAIEAQQHLLQLTVWGIKQLQARILAVERYLKDQQLLGIWGCSGKLICPTTVPWNLSWSNKSQDEIWGNMTWMEWEKEIGNYTDTIYRLIESAQNQQEKNEQDLLALDKWDNLWNWFSITRWLWYIEIFIMIIGSLIGLRIVFTVLSIINRVRQGYSPLSLQTLIPNSRGPERPGGIEEEGGEQDKDRSIRLVSGFLALAWDDFRSLCVFSYHCLRNFILIAARTVDKGLKRGWEVLKYLWNLAQYWGQELKNSAISLLDRTAIAVAEGTDRIIEILQRAGRAVLNIPRRIRQGLERALL

SEQ ID NO: 254 - protein, 849 aa, HIV
MRVREMQRNWQHLGKWGLLFLGILIICNAADNLWVTVYYGVPVWKEATTTLFCASDAKAYEREIHNVWATYACVPTDPNPQELVLGNVTENFNMWKNNMVDQMHEDIISLWDQSLKPCVQITPLCVTLNCTDVPVNITNGNSTLDNITLEEQGEIKNCSFNITTEINDIKKKESAIFYRLDVVPINNSTSEYRLLSCNTSTVTQACPKVSFDPIPIHYCAPAGFAILKCNDKEFNGTGLCRNVSTVQCTHGIKPVVSTQLLLNGSLAEGDIVIRSENISDNAKTIIVQFNRSVAINCTRPTNITRRSMRIGPGRVFYATGTVLGDIRKAYCTINGTLWNKTLEGVAKEVQSHLNKSITFAPSSGGDLEVTTHSFNCRGEFFYCNTVALFNATNMTNAMNRSNGIITLPCRIRQIVNMWQRVGRAMYAAPIAGQIQCNSSITGLILTRDGGKNNTNNDTLRPGGGDMRDNWRSELYKYKVVKIEPLGVAPTKAKRQVVKREREKRAVGIGAVLLGFLGAAGSTMGAASMTLTVQARQLLSGIVQQQNNLLKAIEAQQHLLQLTVWGIKQLQARILAVERYLKDQQLLGIWGCSGKLICTTNVPWNSSWSNKSQNEIWENMTWMQWEKEISNYTGTIYKLIENAQNQQEKNEQDLLALDKWDNLWSWFTITNWLWYIKLFIMIVGGLIGLRIVFAVLAVINRVRQGYSPLSLQTLTPSRREPERPGGIEEEGGEQDKTRSVRLVSGFLALAWDDLRSLCLFSYRHLRDFILIAARTVNKGLIRGWEILKYLGNLAQYWGREIKNSAIDLLNTTAIVVAEGTDRIIEVLQRAGRAILHIPRRIRQGAERALL

SEQ ID NO: 255 - protein, 854 aa, HIV
MRVKGIQRNWQHLWNWGILILGLVIICSAEKLWVTVYYGVPVWEDANAPLFCASDAKAHSTESHNIWATHACVPTDPSPQEINMRNVTENFNMWKNNMVEQMHEDIISLWDESLKPCVKLTPLCVTLNCTEINNNSTRNITEEYRMTNCSFNMTTELRDKKKAEYALFYRTDVVPINEMNNENNGTNSTWYRLTNCNVSTIKQACPKVTFEPIPIHYCAPAGFAILKCVDKKFNGTGTCNNVSTVQCTHGIKPVVSTQLLLNGSLAEKDIIISSENISDNAKVIIVHLNRSVEINCTRPNNNTRRSVAIGPGQAFYTTGEVIGDIRKAHCNVSWTKWNETLRDVQAKLQEYFINKSIEFNSSSGGDLEITTHSFNCGGEFFYCNTSGLFNNSILKSNISENNDTITLNCKIKQIVRMWQRVGQAMYAPPIAGNITCRSNITGLILTRDGGDNNSTSEIFRPGGGDMKNNWRSELYKYKTVKIKSLGIAPTRARRRVVEREKRAVGVGAIFLGFLGTAGSTMGAASITLTVQVRQLLSGIVQQQSNLLRAIEAQQHLLQLTVWGIKQLRARVLALERYLKDQQLLGIWGCSGKLICTTNVPWNTSWSNKSYNEIWENMTWIEWEREIDNYTYHIYSLIEQSQIQQEKNEQDLLALDQWASLWSWFSISNWLWYIRIFVMIVGGLIGLRIVFAVLSIVNRVRQGYSPLSFQTLLHHQREPDRPAGIEEGGGEQDRDRSIRLVSGFLALAWDDLRSLCLFSYHRLRDFILIAARTVELLGRNSLKGLRLGWEALKYLWNLLLYWARELKNSAINLLDTIAIAVANWTDRVIEVAQRAGRAVLNIPRRIRQGLERALL

SEQ ID NO: 256 - protein, 850 aa, HIV
  misc_feature (405)..(405): Xaa can be any naturally occurring amino acid
MRVKGIERNWQHLWKWGTLILGLVIICSASNNLWVTVYYGVPVWEDAKTTLFCASDAKAYSTERHNIWATHACVPTDPDPQEIPLGNVTENFNVWKNDMVEQMHEDIISLWDESLKPCVKLTPLCVTLNCTDANVTTVANESVSAQEIKNCSFNITTEIRDRKRKEYALFYRLDVIPINDDSSNSTGNYSNYRLINCNVSTIKQACPKVDFDPIPIHYCAPGGFAILKCKEKEFNGTGPCQNVSTVQCTHGIKPVVSTQLLLNGSLAEGEIIIKSENITDNTKVIIVQLNETVEITCVRPNNNTRKSIHLGPGQALYATGDIIGNIRQAHCDVSGRNWSNMIEKVKAQLRKIFNKTITFDSSAGGDLEITTHSFNCRGEFFYCNTSGLFNNETISNGTITLPCGXKQIVRLWQRVGQAMYSPPIARNITCKSNITGLLLTRDGGNANNASETETFRPAGGNMKDNWRNELYKYKVVKIKPLGVAPTKARRRVVGREKRAVGVGAVFLGFLGAAGSTMGAASITLTVQVRQLLSGIVQQQSNLLRAIEAQQHLLQLTVWGIKQLQARVLALERYLRDQQLLGIWGCSGKLICTTNVPWNASWSNKTYNDIWDNMTWIQWDREISNYTQQIYSLIEESQNQQEKNEQDLLALDNWASLWTWFDITKWLWYIKIFIMIVGGLISLKIIFAVLSIVNRVRKGYSPLSFQTLTHHQREPDRPERIEEEGGEQDKDRSIRLVSGFLALAWDDLRSLCLFSYHRLRDFILIAARTVELLGHNSLKGLRLGWEGLKYLWNLLLYWGRELKNSAINLLDTIAIAVANWTDRVIEIVQRAFRAFLNIPTRIRQGLERALL

SEQ ID NO: 257 - protein, 849 aa, HIV
MRVKGIQRNWQHLWKWGTLILGLVIICSASDNLWVTVYYGVPVWEDADTPLFCASDAKSYSSEKHNVWATHACVPTDPNPQEIAIENVTENFNMWKNNMVEQMQEDIISLWEESLKPCVKLTPLCITLNCTNVNSANHTEANNTVENKEEIKNCSFKITTERGGKKKEEYALFYKLDVVPISNGNKTSYRLIHCNVSTIKQACPKVNFDPIPIHYCAPAGFAILKCRDKEYNGTGPCKNVSTVQCTHGIKPVVSTQLLLNGSLAEEDIRIRSENFTDNTKVIIVQLNNSIEINCIRPNNNTRKSIPIGPGQAFYATGDIIGDIRQAHCNVSRIKWREMLKNVTAQLRKIYNNKNITFNSSAGGDLEITTHSFNCRGEFFYCNTSGLFNNNISNINNETITLPCKIKQIVRMWQKVGQAMYALPIAGNLVCKSNITGLILTRDGGNNNDSTEETFRPGGGDMRDNWRSELYKYKTVKIKSLGVAPTRARRRVVEREKRAVGLGAVFLGFLGAAGSTMGAASITLTAQVRQLLSGIVQQQSNLLRAIEAQQHLLQLTVWGIKQLQSRVLAIERYLKDQQLLGIWGCSGKLICTTNVPWNTSWSNKSYNEIWDNMTWLEWEREIHNYTQHIYSLIEESQNQQEKNEQDLLALDKWASLWNWFDISNWLWYIRIFIMIVGGLIGLRIVFAVLSIVNRVRQGYSPLSFQTLTHHQREPDRLGKTEEGGGEQDRDRSTRLVSGFLALAWDDLRSLCLFSYHRLRDLVLIAARTVELLGRSSLKGLRLGWEGLKYLWNLLLYWGRELKNSAINLLDTIAIATANGTDRVIEVAQRAYRAILNVPTRIRQGLERALL

SEQ ID NO: 258 - protein, 883 aa, HIV
MRVRGTQTNWQLLWKWGTLILGLVIICSASNNLWVTVYYGVPVWEDADTTLFCASDAKAYSTESHNVWATHACVPTDPNPQEIPMKNVTENFNMWKNNMVEQMHEDIISLWDESLKPCVKLTPLCVTLTCTNVTINVTSSSNSSVTSTSTVGSTTSTSTVGSTASTSTVGSTAGYREELKNCSFNITTEIKDRRKQEYALFYKLDIVPINDGRNSSANNYRLINCNVSTIKQACPKVSFDPIPIHYCAPAGFAILKCRDKEFNGTGLCKNVSTVQCTHGIKPVVSTQLLLNGSLAEGEIMIRSENITNNAKNIIVQLNETVPITCARPSNNTRKSIRFGPGQAFYATDAIIGDIRQAHCNISRIRWENMKQNVTAKLEKIFKKNITFNPPAGGDLEITTHSFICRGGFFYCNTSALFNSSSLSNSNSSNDTITLPCRIKQIVRMWQRVGQAMYAPPIEGNITCMSNITGLLLTRDGGENNGTNETEIFRPVGGDMRDNWRSELYKYKVVKIKPLGVTPTRARRRVVGREKRAVGLGAVLLGFLGTAGSTMGAASITLTVQVRQLLSGIVQQQSNLLRAIEAQQHLLQLTVWGIKQLQARVLAVERYLKDQQLLGIWGCSGRLICTTNVPWNASWSNKSYNQIWDNLTWVQWEREISNYTQQIYTLLEESQNQQEKNEQDLLALDKWADLWNWFDISRWLWYIKIFIMIVGGLIGLRIVFAVLSIINRVRKGYSPLSFQTLTHHQREPDRPGRIEEGDGEQDRDKSIRLVSGFLALAWDDLRSLCLFSYHHLRDFILIAARTVELLGRSSLKGLSLGWEGLKYLWNLLLYWGRELKNSAINLIDTVAIAVANWTDRAIEVVQRVGRAILNIPVRIRQGLERLLL

SEQ ID NO: 259 - protein, 859 aa, HIV
METQRNYPSLWRWGTLILGMLLICSVVGNLWVTVYYGVPVWKEAKTTLFCASDAKAYDTERHNVWATHACVPTDPNPQEMVLENVTETFNMWVNDMVEQMHTDIISLWDQSLKPCVKLTPLCVTLDCSSVNATNVTKSNNSTDINIGEIQEQRNCSFNVTTAIRDKNQKVHALFYRADIVQIDEGERNKSDNHYRLINCNTSVIKQACPKVSFEPIPIHYCAPAGFAILKCNGKKFNGTGPCTNVSTVQCTHGIRPVVSTQLLLNGSLAEVEEVIIRSKNITDNTKNIIVQLNEPVQINCTRTGNNTRKSIRIGPGQAFYATGDIIGDIRRAYCNISGKQWNETLHKVITKLGSYFDNKTIILQPPAGGDIEIITHSFNCGGEFFYCNTTKLFNSTWTNSSYTNDTYNSNSTEDITGNITLQCKIKQIVNMWQRVGQAMYAPPIRGNITCISNITGLILTFDRNNTNNVTFRPGGGDMRDNWRSELYKYKVVKIEPLGVAPTEARRRVVEREKRAVGMGAFFLGFLGAAGSTMGAASITLTVQARQLLSGIVQQQSNLLRAIQAQQHMLQLTVWGIKQLQARVLAVERYLKDQQLLGIWGCSGKLICTTNVPWNSSWSNKSLDEIWDNMTWMEWDKQINNYTDEIYRLLEVSQNQQEKNEQDLLALDKWANLWNWFSITNWLWYIRIFIMIVGGIIGLRIVFAVLSIVNRVRQGYSPLSLQTLIPNQRGPDRPREIEEEGGEQDRDRSIRLVNGFLPLVWEDLRNLCLFSYRRLRDLLSIVARTVELLGRRGWEALKLLGNLLLYWGQELKNSAISLLNTTAIAVAEGTDRIIELVQRAWRAILHIPRRIRQGFERALL

SEQ ID NO: 260 - protein, 852 aa, HIV
MRNYPQWWRGGILLLGMLLIYSAAGNLWVTVYYGVPVWKEAKTTLFCASDAKAYEPEKHNVWATHACVPTDPSPQEMVLANVTENFNMWDNDMVEQMQTDIISLWDQSLKPCVKLTPLCVTLDCSNITRNDTNSSSTVNATSSPSANELTNCSFNVTTVIRDKQQRVHALFYRLDVVPIDETSNNNNSNSTKYRLINCNTSVITQACPKVSFDPIPIHYCAPAGFAILKCNNKTFNGTGPCTNVSTVQCTHGIKPVVSTQLLLNGSLAEGQVIIRSKNISDNTKNIIVQLDSPIEITCTRPNNNTRKGIHFGPGQAFYATGDIIGNIRQAHCNVSEEKWNKTLQQIATQLSKYFVNRTLIFKPHSGGDLEVTTHSFNCRGEFFYCNTSGLFNSSWTGDNINMPNDTGKNITLPCRIKQIVNMWQRVGQAMYAPPIKGSITCVSNITGLILTYDEDKGNNDNVTFRPGGGDMRDNWRSELYKYKVVKIEPLGVAPTEARRRVVEREKRAVGMGAFFLGFLGAAGSTMGAASITLTVQARQLLSGIVQQQSNLLRAIQAQQHMLQLTVWGVKQLQARVLAVERYLKDQQLLGIWGCSGKLICTTNVPWNSTWSNKSLAEIWDNMTWMEWDRQIDNYTEVIYRLLELSQTQQEQNEQDLLALDKWDSLWNWFSITNWLWYIKIFIIIVGALIGLRIIFAVLSIVGRVRQGYSPLSFQTLIPNPRGPDRPEGIEEEGGEQDRGRSVRLVNGFLPIVWDDLRSLCLFSYRLLRDSLLIVIRTVELLGRRGREALKYLWNLLQYWGQELKNSAINLLNTTAIVVAEGTDRIIEIVQRAWRAVLHIPRRIRQGLERILL

SEQ ID NO: 261 - protein, 845 aa, HIV
METQRNYPSLWRWGTLILGMLLICSAAQNLWVTVYYGVPVWKEAKTTLFCASDAKAYETEKHNVWATHACVPTDPNPQEMVMENVTESFNMWENNMVEQMHTDIISLWDQSLKPCVKLTPLCVTLNCTNVRNNTSNSTSSMEAGGELTNCSFNVTTVLRDKQQKVHALFYRLDVVPIDNNSTQYRLINCNTSVITQACPKVSFEPIPIHYCAPAGFAILKCNNKTFNGTGLCTNVSTVQCTHGIRPVVSTQLLLNGSLAEEQIIIRTKNISDNTKNIIVQLKTPVNITCTRPNNNTRTSIHLGPGRAFYATGDIIGDIRQAHCNISRTDWNKTLHQVVTQLGIHLNNRTISFKPNSGGDMEVRTHSFNCRGEFFYCNTSGLFNSSWEMHTNYTSNDTKGNENITLPCRIKQIVNMWQRVGRAMYAPPIQGNIMCVSNITGLILTIDEGNASAENYTFRPGGGDMRDNWRSELYKYKVVKIEPLGIAPTKTRRRVVEREKRAVGMGASFLGFLGAAGSTMGAASITLTVQARQLLSGIVQQQSNLLRAIQARQHMLQLTVWGIKQLQARVLAVERYLRDQQLLGIWGCSGKLICTTNVPWNSSWSNKSQSEIWDNMTWMEWDKQISNYTEEIYRLLEVSQTQQEKNEQDLLALDKWASLWTWFDISHWLWYIKIFIMIVGGLIGLRIIFAVLSIVNRVRQGYSPLSFQTLVPNPRGPDRPEGTEEGGGEQDRDRSVRLVNGFLPVVWDDLRSLSLFSYRLLRDLLLIVVRTVELLGRRGREALKYLWNLLQYWGQELKNSAIDLLNTTAIAVAEGTDGIIVIVQRAWRAILHIPRRIRQGFERSLL

SEQ ID NO: 262 - protein, 853 aa, HIV
METQMNWKNLWKWGLMIFGMLMICNGAEKLWVTVYYGVPVWKDAKTTLFCASDAKSYSTEKHNVWATHACVPTDPNPREITMENVTENFNIWKNDMVEQMHDDIISVWDESLKPCVKITPLCVTLNCTEATINNSTDNSNTTSPSPTITNPLGMKNCSFNITTEIGDRRKKEYALFYKQDVVSIDNSNSSYILINCNTSVIKQACPKVSFEPIPIHYCAPAGFAILKCNDNKFNGTGPCKNVSTVQCTHGIKPVVSTQLLLNGSIAEKEVIIKSKNISDNAKTIIVQLNQTVEINCTRPANNTRKGIPIGPGQVLYATGAVIGNIRQAHCNISGVKWNNTLHKVAEELREQEHFKNKTIVFAPANSGGDIEIMMHTFNCGGEFFYCNTSILFNSSWDENSTVTINETVTLPCKIRQIVRMWQRVGQAIYAPPIAGNITCTSNITGLLLTRDGGNTKESNSSETFRPTGGDMKDNWRNELYKYKIVKVEPLGVAPTRAKRRVVEREKRAIVGMGAVFLGFLGTAGSTMGAASIALTVQARQLLSGIVQQQSNLLKAIEAQQHLLRLTVWGIKQLQARILAVERYLKDQQLLGIWGCSGKLICTTNVPWNSSWSNKSHDEIWNNMTWVEWEREIDNYTRIIYNLIEVSQNQQEKNEQDLLALDKWTSLWSWFKISNWLWYIRIFIMIVGGLIGLRIIFAVLAIVNRVRQGYSPLSLQTLIPNPTGVDRPGEIEEGGGEQGRTRSIRLVSGFLALAWDDLRSLCLFSYHRLRDFVLIVARTVETLGRRGWEILKYLGNLVCYWGQELKNSAISLLNATAIAVAAGTDRIIEIVQGIFRAILHIPRRIRQEQLDGLR

SEQ ID NO: 263 - protein, 848 aa, HIV
  misc_feature (399)..(399): Xaa can be any naturally occurring amino acid
METQKNWQTLWRGGLMIFGMLMICKAKEDLWVTVYYGVPVWKDAKTTLFCASDAKAYSTEKHNVWATHACVPTDPSPQEMNLPNVTENFNMWKNDMVDQMQEDIISVWDESLKPCVKITPLCVTLNCSNITSNSNTTSNSSVSSPDIMTNCSFNITTEIRNKRKQEYALFYRQDVVPIDSNNKNYILINCNTSVIKQACPKVSFQPIPIHYCAPAGFAILKCNDKNFNGTGSCKNVSTVQCTHGIKPVVSTQLLLNGSIAEGDIIIRSENISDNAKNIIVQLNKTVEIVCYRPNNNTRKGIHMGPGQVLYATGEIIGNIRETHCNISERDWSNTLRRVATKLREHFNKTINFTSPSGGDIEIVTHSFNCGGEFLYCNTSKLFNSSWDKNSIEATNDTSXATITIPCKIKQIVRMWQRTGQAIYAPPIAGNITCTSNITGLLLTRDGGNRGNGSENGTETFRPTGGNMKDNWRSELYKYKVVEIEPLGVAPTKAKRRVVEREKRAVGIGAVFLGFLGTAGSTMGAASITLTVQVRQLLSGIVQQQSNLLKAIEAQQHLLKLTVWGIKQLQARVLAVERYLKDQQLLGIWGCSGKLICTTNVPWNASWSNKSYEDIWENMTWIQWEREINNYTGIIYSLIEEAQNQQENNEKDLLALDKWTNLWNWFNISNWLWYIKIFIMIIGGLIGLRIIFAVLAIVNRVRQGYSPLSFQTLIPNPTEADRPGGIEEGGGEQGRTRSIRLVNGFLALAWDDLRNLCLFSYHRLRDFVLIAARTVGTLGLRGWEILKYLVNLVWYWGQELKNSAISLLNTTAIAVAEGTDRIIEIAQRAFRAILHIPRRIRQGLERALL

SEQ ID NO: 264 - protein, 850 aa, HIV
  misc_feature (554)..(554): Xaa can be any naturally occurring amino acid
METQTSWLSLWRWGLMIFGMLMICSARENLWVTVYYGVPVWRDAKTTLFCASDAKAYSTEKHNVWATHACVPTDPNPQEMSLPNVTENFNMWKNDMVDQMQEDIISVWDESLKPCVKITPLCVTLNCSDVNSNNSTDSNSSASNNSPEIMKNCSFNVTTEIRNKRKQEYALFYRQDVVPINSDNKSYILINCNTSVIKQACPKVSFQPIPIHYCAPAGFAILKCNNKTFNGTGPCKNVSTVQCTHGIKPVVSTQLLLNGSVAEGDIIIRSENISDNAKNIIVQLNDTVEIVCTRPNNNTRKGIHMGPGQVLYATGEIIGDIRKAYCNISRKDWNNTLRRVAKKLREHFNKTIDFTSPSGGDIEITTHSFNCGGEFFYCNTSTLFNSSWDENNIKDTNSTNDNTTITIPCKIKQIVRMWQRTGQAIYAPPIAGNITCKSNITGLLLTRDGGNRNGSENGTETFRPTGGNMKDNWRSELYKYKVVELEPLGVAPTKAKRRVVEREKRAVGIGAVFLGFLGTAGSTMGAASITLTVQVRQLLSGIVQQQSNLLKAIXAQQHLLKLTVWGIKQLQARVLAVERYLKDQQLLGIWGCSGKLICTTNVPWNASWSNKSYEDIWENMTWIQWEREINNYTGIIYSLIEEAQNQQETNEKDLLALDKWTNLWNWFNISNWLWYIKIFIMIIGGLIGLRIIFAVLAIVNRVRQGYSPLSFQTLIPNPTEADRPGGIEEGGGEQGRTRSIRLVNGFLALAWDDLRSLCLFSYHRLRDFVLIAARTVGTLGLRGWEILKYLVNLVWYWGQELKNSAISLLNTTAIAVAEGTDRIIEIAQRAFRAILHIPRRIRQGLERALL

SEQ ID NO: 265 - protein, 851 aa, HIV
MRAREIQRNWQHLGKRGILFLGILIICSAANNLWVTVYYGVPVWKEATTTLFCASDAKAYETEVHNVWATHACVPTDPNPQEVVLENVTENFNMWKNNMVEQMHTDIISLWDESLKPCVKLTPLCVTLTCTNVTNNRTNANKNDTNINATVTSTDEIKNCSFNITTELKDKKKRVSALFYKLDIVQIKQSEINQSESEDRLINCNTSTVTQACPKVSFEPIPIHYCAPAGFAILKCNNNTCNGTGPCTNVSTVQCTHGIKPVVSTQLLLNGSLAEEEIIIRSEDITKNTKNIIVQLNEAVEINCTRPSNNTRKSIHIGPGRAFYATGDIIGDIRQAHCNISGGQWNKTVNQVKKELGKHFNKTIIFQPSSGGDPQVTRHIFNCRGEFSYCDTTDTVDDTEEEEDTTITIPCRIKQIINMWQKVGQAIYAPPTAGNITCRSNITGMILTRDGGNDNNTRTEETFRPGGGDMRDNWRSELYKYKVVQIEPLGIAPTRARRRVVQREKRAVGIGALFLGFLGAAGSTMGAASITLTVQARQLLSGIVQQQNNLLRAIEAQQQMLQLTVWGIKQLRARVLAVERYLRDQQLLGIWGCSGKLICTTNVPWNSSWSNKSQSEIWENMTWMQWEKEISNHTSTIYRLIEESQIQQEKNEQDLLALDKWASLWNWFDISNWLWYIKIFIMIVGGLIGLRIVFTVLSVVNRVRQGYSPLSFQTLTPSPRGPDRPEGIEEGGGEQDKDRSVRLVSGFLALAWDDLRNLCLFSYRHLRDLVLIATRILDRGLKGSWEALKYLWNLILYWGQEIKNSAINLLNTTAIAVAEGTDRIIEIVYRAFRALLHIPRRIRQGFERLLL

SEQ ID NO: 266 - protein, 842 aa, HIV
MRVRGMQRNWQTLGNWGILFLGILIICSNADKLWVTVYYGVPVWKEATPTLFCASDAKAYEKEVHNVWATHACVPTDPNPQEVEMENVTENFNMWKNNMVEQMHTDIISLWDESLKPCVELTPLCVTLNCTDYKGTNSTNNATSTVVSPAEIKNCSFNITTEIKDKKKKESALFYRLDVLPLNGEGNNSSTEYRLINCNTSTITQTCPKVTFEPIPIHYCAPAGFAILKCKDKRFNGTGPCKNVSTVQCTHGIKPVVSTQLLLNGSLAEEEIIIRSENITDNTKNIIVQLNETVQINCTRPNNNTRKSIHMGPGKAFYTTGDIIGDIRQAHCNISGEKWNMTLSRVKEKLKEHFKNGTITFKPPNPGGDPEILTHMFNCAGEFFYCNTTKLFNETGENGTITLPCRIKQIINMWQKVGKAIYAPPIAGSINCSSNITGMILTRDGGNNTHNETFRPGGGDMRDNWRSELYKYKVVQIEPLGIAPTRARRRVVQREKRAVGLGAVFFGFLGAAGSTMGAASITLTVQARQLLSGIVQQQSNLLRAIEAQQHLLQLTVWGIKQLRARILAVERYLKDQQLLGIWGCSGKLICTTNVPWNSSWSNKSWEEIWNNMTWMEWEKEIGNYSDTIYKLIEESQTQQEKNEQDLLALDKWASLWNWFDITKWLWYIKIFIMIIGGLIGLRIAFAVLSVVNRVRQGYSPLSFQTLIPTSRGADRPEGIEEEGGEQDKNRSVRLVSGFLALAWDDLRNLCLFSYRQLRNLILIVTRILERGLRGGWEALKYLWNLVQYWSQELKNSAISLLNTTAIAVAGGTDRIIEIGQRAFRALLHIPRRIRQGLERALL

SEQ ID NO: 267 - protein, 857 aa, HIV
MRVKETQMNWPNLWKWGTLILGLVIICSASDNLWVTVYYGVPVWRDADTTLFCASDAKAHETEVHNVWATHACVPTDPNPQEIHLENVTENFNMWKNNMVEQMQEDVISLWDQSLKPCVKLTPLCVTLNCTNANLTNGSSKTNVSNIIGNITDEVRNCTFNMTTELTDKKQKVHALFYKLDIVQIEDKKTSSEYRLINCNTSVIKQACPKISFDPIPIHYCTPAGYAILKCNDKNFNGTGPCKNVSSVQCTHGIKPVVSTQLLLNGSLAEEEIIIRSEDLTNNAKTIIVHLNKSVEINCTRPSNNTRTSITIGPGRVFYRTGDIIGNIRKAYCEINGTKWNKVLKQVTEKLKEHFNKTIIFQPPSGGDLEITMHHFNCRGEFFYCNTTKLFNNTCLGNETMAGCNDTITLPCKIKQIINMWQGAGQAMYAPPISGRINCVSNITGILLTRDGGVNNTDNETFRPGGGNIKDNWRSELYKYKVVQIEPLGIAPTRAKRRVVEREKRAVGIGAMIFGFLGAAGSTMGAASITLTVQARQLLSGIVQQQSNLLRAIEAQQHLLQLTVWGIKQLQARVLAVERYLKDQKFLGLWGCSGKIICTTAVPWNSTWSNRSFEEIWNNMTWIEWEREISNYTNQIYEILTESQNQQDRNEKDLLELDKWASLWNWFDITNWLWYIKIFIMIVGGLIGLRIIFAVLSIVNRVRQGYSPLSFQTPSHHQKEPDRPEGIEEGGGEQGRDRSVRLVSGFLALAWDDLRSLCLFSYHRLRDLTLIAARTVELLGHSSLKGLRRGWEGLKYLGNLLLYWGQELKISAISLLDATAIAAAGWTDRVIEVAQGAWRAILHIPRRIRQGLERTLL

SEQ ID NO: 268 - protein, 860 aa, HIV
MRVKETQMNWPNLWKWGTLILGLVIICSASDNLWVTVYYGVPVWKDADTTLFCASDAKAHETEVHNVWATYACVPTDPNPQEIHLENVTENFNMWKNNMVEQMQEDVISLWEQSLKPCVQLTPLCVTLHCTNANLKANLTNVNNTTNVGNITEEVRNCSFNMTTELRDRQQKVYALFYKLDLVQMGNNNNSNNYSEYRLINCNTSVIKQACPKISFDPIPIHYCTPAGYAILKCNDKNFNGTGPCKNVSSVQCTHGIKPVVSTQLLLNGSLAEEEIIIRSENLTNNAKTIIVHLNKSVEINCTRPSNNIRTSIRIGPGRVFYKTGAITGDIRKAYCEVNGTKWNEALKQVAGKLKEHFNNTIVFQPPSGGDLEITMHHFNCRGEFFYCNTTQLFNSTWTRNETMGGRNGTITLPCRIKQIINMWQGVGQAMYAPPISGRINCVSNITGILLTRDGGANNTQNETFRPGGGNIKDNWRSELYKYKVVQIEPLGIAPTRAKRRVVEREKRAVGIGAMIFGFLGAAGSTMGAASITLTVQARQLLSGIVQQQSNLLRAIEAQQHLLQLTVWGIKQLQARVLAVERYLKDQKFLGLWGCSGKIICTTAVPWNSTWSNRSFEEIWNNMTWIEWEREISNYTNQIYEILTESQDQQDRNEKDLLELDKWASLWNWFDITNWLWYIKIFIMIVGGLIGLRIIFAVLSIVNRVRQGYSPLSFQTPSHHQREPDRPERIEEGGGEQDRNRSVRLVSGFLALAWDDLRSLCLFLYHRLRDFILIAARTVELLGHSSLKGLRRGWEGLKYLGNLLLYWGQELKISAISLLNTTAIAVAGWTDRVIEVAQGAWRAILHIPRRIRQGLERALL

SEQ ID NO: 269 - protein, 864 aa, HIV
MRVMGTQRNYPPLLRWVTIILWIIIICSAEKLWVTVYYGVPVWRDAETTLFCASEARAYDPEAHNVWATHACVPTDPNPQELPLENVTEEFNMWKNNMVEQMHEDIISLWDQSLKPCVKLTPLCVTLNCSDVTFNRTFDSEMKKEIKNCTFNTTTERIDKKEKAYALFYKLDIKELEGSKDNSSNSSQFILIHCNTSTIAQACPKVSFEPIPIHYCAPAGFAILECKEKNFNGTGPCKNVSTVQCTHGIKPVVSTQLLLNGSLAEEEVMIRSENITNNAKTIIVQLVTPVKINCTRPGNPIRKRVGIGPGQAFHATGNIIGDIRRAQCNVSGTEWKEALQKVTEQLGKHFNVSTINFTKSSGGDVEITTHSFNCGGEFFYCNTSGLFNSTWSRNSTDNSTWNINDTVSSNHTGNITLQCRIRQVVRMWQRVGQAMYAPPIPGEIKCKSNITGILLTRDGGTKNQNASEEFNTTEVFRPGGGDMRDNWRSELYKYKVVQIEPIGVAPTRAKRRVVQKEKRAVGLGAFFLGFLGVAGSTMGAASITLTVQARQLLSGIVQQQSNLLKAIEAQQHILRLTVWGIKQLQARVLALERYLKDQQLLGIWGCSGKLICTTNVPWNSSWSNKTYDKIWDNMTWMQWDREISNYTEIIYDLIEESQKQQEKNEQELLALDKWTSLWNWFSISNWLWYIRIFIMIVGGLIGLRIVCAVLNVINRVRQGYSPLSFQTLTHHQREPDRPERIEEGGGERDRDRSVRLVSGFLALAWDDLRSLCLFSYHQLRDFVLILGHSSLKGLRLGWEALKLLGDLLLYWGRELKNSAINLLDTVAIAVANWTDRVIEIGQRVGRAILNIPTRIRQGFERALL

SEQ ID NO: 270 - protein, 854 aa, HIV
MRVMGIQKNYPLLWRWGTNIFWIMIICNAEQLWVTVYYGVPVWKTAETTLFCASDAKAYDTEVHNVWATHACVPTDPNPQEIHLENVTEKFNMWKNNMVEQMHEDIISLWDQSLKPCVKLTPLCVTLDCHNFNNSYSNSSNLTSDMNGEIKNCSFNITTEVRDKKKKMHALFYRLDVVQINENNGSQYRLINCNTSAITQACPKVSFEPIPIHYCAPAGFAILKCKDKGFNGTGPCKNVSTVQCTHGIKPVVSTQLLLNGSLAEGEVVIRSENITNNAKTIIVQLANPVKINCTRPNNNTRKGVHIGPGQAFYATGDIIGDIRQAHCNVSKTEWNKTLHQVVTQLKTYFKNTTIIFANPLGGDVEITTHSFNCGGEFFYCNTSKLFNSTWDNSNSTANHTGSNDTITLQCRIKQIVNMWQKVGQAMYAPPIQGIIRCDSNITGLLLTRDGGNNSTNETFRPGGGDMRDNWRSELYKYKVVKIEPLGVAPTRAKRRVVEREKRAVGLGAVFLGFLGAAGSTMGARSITLTVQARQLLSGIVQQQSNLLKAIEAQQHLLKLTVWGIKQLQARVLALERYLRDQQLLGIWGCSGKLICTTTVPWNSSWSNKTFNDIWDNMTWIQWEKEISNYTDIIYNLIEESQNRQEKNEQDLLALDKWASLWNWFDITNWLWYIRIFIMIVGGLIGLRIVFAVLTIINRVRQGYSPLSFQTLTHHQREPDRPERIEEGGGEQDKDRSVRLVSGFLALAWDDLRSLCLFSYHRLRDLILIAARTVELLGHNCLKGLRLGWGALKYLWNLISYWVQELKNSAINLLNTIAIVVANWTDRAIEIGQRVGRAIRNIPRRIRQGFERALL

SEQ ID NO: 271 - protein, 840 aa, HIV
MRVKEIRKHLWRWGTLFLGMLMICNATENLWVTVYYGVPVWKEATTTLFCASDAKAYSKEVHNVWATYACVPTDPSPQEILLENVTENFNMGKNNMVEQMHEDIISLWDQSLKPCVKLTPLCVTLNCTDLKKNVTNNNTISPGMREMKNCSFNITTGLRDKVKKEYALFYELDVVQINNDSYRLISCNTSVVTQACPKISFEPIPIHYCAPAGFAILKCNDKKFNGTGPCTNVSTVQCTHGIKPVVSTQLLLNGSLAEKEVVIRSVNFTDNTKTIIVQLKEPVEINCTRPNNNTRKGIHMGPGRAFYATGDIIGDIRQAHCNISTTEWNNTLKQIVDKLKKQFGNKTIVFNQSSGGDPEIVMHSFNCGGEFFYCNTAELFNSTWNGIGGLNNTEGDTVTLPCRIKQIINMWQEVGKAMYAPPIAGQIRCSSNITGLLLTRDGGDQSNGTEIFRPGGGDMRDNWRSKLYKYKVVKIEPLGVAPTKAKRRVVQGEKRAVGIGAVFLGFLGAAGSTMGAASITLTVQARQLLSGIVQQQNNLLRAIEAQQHLLQLTVWGIKQLQARVLAVERYLKDQQLLGIWGCSGKLICTTAVPWNTSWSNKSLDDIWNNMTWMEWEREINNYTGLIYTLIEESQNQQEKNEQELLALDKWASLWNWFDISNWLWYIKIFIMIVGGLVGLRIIFAVLSLVNRVRQGYSPLSFQTRLPTQRGPDRPEGIEEEGGKRDRDTSIRLVNGFLALIWDDLRSLCLCIYHHLRDLLLIAARIVELLGHRGWEALKYWWNLLQYWIQELKSSAINLINTIAIAVAGWTDRVIEIGQRFCRAIRNIPRRIRQGAEKALQ

SEQ ID NO: 272 - protein, 840 aa, HIV
  misc_feature (607)..(607): Xaa can be any naturally occurring amino acid
MRVKEIRKHLWRWGTLFLGMLMICSATENLWVTVYYGVPVWKEATTTLFCASDAKAYSKEVHNVWATYACVPTDPSPQEIPLKNVTENFNMGKNNMVEQMHEDIISLWDQSLKPCVKLTPLCVTLNCTDLKKEVTSTNTSSIKMMEMKNCSFNITTDLRDKVKKEYALFYKLDVVQIDNDSYRLISCNTSVVTQACPKISFEPIPIHYCAPAGFAILKCNDKKFNGTGPCTNVSTVQCTHGIKPVVSTQLLLNGSLAEEEVVIRSVNFTDNTKTIIVQLKEPVEINCTRPNNNTRKGIHIGPGRAFYATGDITGDIRQAHCNISITKWNNTLKQIVIKLRKQFGNKTIVFNQSSGGDPEIVMHSFNCGGEFFYCNTTKLFNSTWNGTEELNNTEGDIVTLPCRIKQIINMWQEVGKARYAPPIAGQIRCSSNITGLLLTRDGGNQSNVTEIFRTGGGDMRDNWRSELYKYKVVKIEPLGVAPTRAKRRVVQREKRAVGIGAVFLGFLGAAGSTMGAASITLTVQARQLLSGIVQQQNNLLRAIEAQQHLLQLTVWGIKQLQARVLAVERYLKDQQLLGIWGCSGKLICTTAVPWNTSWSNKPLDEIXNNMTWMEWEREINNYTGLIYNLIEESQNQQEKNEQEILALDKWASLWNWFDISKWLWYIKIFIMIVGGLVGLRIIFAVLSIVNRGRQGYSPLSFQTRLPAQRGPDRPEGIEEEDGERDRDTSIRLVNRFLALIWDDLRSLCFFIYHHLRDLLLIAARIVELLGRRGWEALKYWWNLLQYWIQELKSSAINLIGTIAIAVAGWTDRVIEIGQRFCRAMRNIPRRIRQGAEKALQ

SEQ ID NO: 273 - protein, 856 aa, HIV
  misc_feature (510)..(510): Xaa can be any naturally occurring amino acid
MRVMGMQRNYPHLWEWGTLILGLVIICSASNNLWVTVYYGVPVWRDAETTLFCASEAKAYEKEVHNIWATHACVPTDPNPQEVALINVTENFNMWKNDMVEQMHEDIISLWNEGLKPCAKLTSLCVTFTCINATTTNSTNGTVIKEGIKNCSFDITTEIRDKKKKEYALFYRIDIVPINARVPINGSNRNNSTEEYMLINCNASTIKQACPKVSFEPIPIHYCAPAGFAILKCNEKNFTGLGPCTNVSSVRCTHGIKPVVSTQLLLNGSLATEEVVIRSKNITDNTKNIIVQLAKAVKINCTRPGNNTRKSVHIGPGLTWYATGEIIGDIRQAHCNISGNDWNDTLKVISEELKRLFPNKTIKFAPPVGGDLEITTHSFNCKGEFFYCNTTPLFNSTHMQNGTNITSTDSTNSTITLQCRLKQFVRMWQEVGQAMYASPIAGSINCSSDITGIILTRDGGTNNTEIFRPGGGDMRDNWRSELYKYKVVKIEPIGVAPNKARRRVVQREKXAVGIGAMFLGFLGAAGSTMGAASMTLTVQARQLLSGIVQQQSNLLRAIEAQQHLLRLTVWGIKQLQARVLALESYLKDQQLLGIWGCSGKLICTTNVPWNSSWSNKSYNDIWDNMTWLQWDKEINNYTQIIYGLLEESQNQQEKNEQDLLALDKWASLWNWFSITKWLWYIKIFIMIVGGLIGLRIIFAVLSIVNRVRQGYSPLSLQTLIPTTQRGLDRPGGTEEEGGEQDRSRSIRLVNGFLPLIWDDLRNLCLFSYRHLRNLLLIVARTVELLGIRGWEALKYLWNFLLYWGQELKNSAINLFNTTAIAVAEGTDRIIEAVQRACRAICNIPRRIRQGLERALL

SEQ ID NO: 274 - protein, 875 aa, HIV
  misc_feature (52)..(52): Xaa can be any naturally occurring amino acid
MRVMGIQRNYPHLWEWGTLILGLVIMCSASKDMWVTVYYGVPVWRDAETKPXCASDAKAYDKEIHNIWATHACVPTDPNPQELALTNVTENFNMWENSTVEQMHEDIISLWDEGLKPCVKLTPLCVALNCSNATIIINSTNNSTTNSTGNSTVKSTAEIKNCSFNITTEVRDKQKKEHALFYRLDVVPINNNVPINNTSNTSEYREYRLMSCNTSNHKQACPKVTLEPNSHTLLCPGWFCDLKCNDKNSPGLGSCTNVSPVQCTHGIKPVVSTQLLLNGSLATGGVVIRSKNFTDNPKNIIVQLDKAVKINCTGLNNNTGGSERIGIGPGHTWYATGNIVGDIRQAHCNISGSDWNEALQKVVVKLREHFPNKTIIFNQSSGGDLEITTHSFNCGGEFFYCNTSGLFNSTYMFNSTNRTNTTNGTNSTITLPCRIKQIVRMWQGVGQAMYAPPIAGSINCSSDITGIILTRDGGISNNNETNDNETLRPGGGDMRDNWRSVLYKYKVVKIEPVGIAPTGARRRVVQKEKRAVGLGALFLGFLGAAGSTMGAASLTLTVQARQLLSGIVQQQSNLLRAIEAQQHLLKLTVWGIKQLQARVLALESYLKDQQLLGIWGCFGKLICTTNVPWNSSWNNKSYNDIWGNMTWLQWDKEINNYTQIIYELLEESQIQQEKNEQDLLAFDKWANLWNWFNISNWLWYIKIFIMIVGGLIGLRIIFAVLSIVNRVRQGYSPLSFQTLIPTQREPGRPEGTEEEGGEQDRSRSIRLVNGFLPLIWDDLRNLCLFSYHHLRNLLLIAARTVELLGRRGWEALKYLWNLLLYWGQELRNSAINLLDTTAIAVAEGTDRILEAVQRACRAIRNIPRRIRQGFEKALL

SEQ ID NO: 275 - protein, 862 aa, HIV
MTVMGTQRNCPRLWTWGTFILWLVIICSASNNLWVTVYYGVPVWRDAETSPFCASDAKAYDKEVHNIWATHACVPTDPNPQEIFLKNVTEDFNMWKNNMVEQMHEDIISLWEEGLKPCVKLTPLCVALNCGDATIKSTNSTPNVTTTNEMKNCSFNITTEIRDKKKKAYALFYRLDIVPINDNNSTNSRRSSNTSDYMLINCNVSSITQACPKIKFEPIPIHYCAPAGFAILQCNEKRFNGSGPCKNVSSVQCTHGIKPVVSTQLLLNGSLSTEGVVLRSKNFTDNTKNIIVQLAEAVKINCTRPNNNTRKGVHIGPGKTWFATGEVIGDIRKAHCNISEKDWNTTLQKIVDELRKHFPNKNITFAPSAGGDVEITTHSFRLGGEFFYCNTSDLFNRTYMVNKNETNSTNTTDEKIIRLPCRIKQIVNRWQEVGQAIYAPPLQGSLTATQVITGIILTRDGGNRSDTGNETFRPGGGDMRDNWRSELYKYKVVQIEPVGVAPTRARRRVVQREKRAVGIGAVFPGLFLGAAGSTMGAASITLTVQARQLLFGIVQQQSNLLRAIEAQQQLLRLTVWGVKQLQARVLALESYLRDQQLLGIWGCSGRLICTTNVPWNSSWSNKSYEKIWDNMTWLQWDKEINNYTEIIYDLLGEAQNQQEKNEQDLLALDKWANLWSWFDISHWLWYIKIFIMIVGGLIGLRIVFAVLSIVKRVRQGYSPLSSQTLIPTTQRGPDRPEGTEGGGGEQDRIESIRLVNGFLPLVWDDLRNLCLFSYRQLRNLLLIVAKTVELLGIRGWGTLKYLWNLLLYWGQEIRSSAISLLDTTAVAVAEGTDRIIEAVQRICRAILNIPRRIRQGLERALL

SEQ ID NO: 276 - protein, 853 aa, HIV
MRVRGMQRNWQHLGKWGLLFLGILIICSAADNLWVTVYYGVPVWKEANTTLFCASDAKGYEKEAHNVWATHACVPTDPNPQELALENVTENFNMWKNNMVEQMHADIISLWDQSLKSCVKLTPLCVTLNCTDATSATTTSKNISATPTSNPNDTLKEEQGAIQNCTFNITTEVKDKNKRVHALFYRLDIVSINSSRKEYRLINCNTSTIKQACPKVCWDPIPIHYCAPAGYAILKCKEKRFNGTGPCKNVSTVQCTHGIKPVVSTQLLLNGSLAEESIIIRSQNILDNTKTIIVHLNESVQINCTRPNNNTRKSIPLGPGQAFYTTGDIIGDIRKAHCNVSGAQWNKTLEQVKEELRAHIKDIGNKTIVFNSSAGGDLEITSHIFNCRGEFFYCNTSGLFNVTVPNNETITLPCRIKQIINMWQGVGQAMYAAPIAGNITCNSNITGILLTRDGGVNITNDTETFRPGGGDMRDNWRSELYKYKVVEIEPLGVAPTRAKRQVVQREKRAVGVGALLIGFLGAAGSTMGAASMTLTVQARQLLSGIVQQQNNLLQAIEAQQHLLQLTVWGIKQLQARVLAVERYLRDQQLLGLWGCSGKLICTTSVPWNSSWSNKSQEEIWENMTWMQWEKEIGQYSNTIYRLIEQSQNQQEKNEKDLLALDKWASLWNWFSISNWLWYIRIFIMIVGGLIGLRIVFTVLSVVNRVRKGYSPLSFQTLLPGPRGPDRPEGTEEEGGEQGRDRSVRLLTGLSTLIWDDLRNLCLFSYHRLRDLILIAARIVELLGRRGWEALKYLWSLLQYWSQELKNSAISLLNTTAVVVAEGTDRILEALQRAGRAVLNIPRRIRQGLERALL

SEQ ID NO: 277 - protein, 861 aa, HIV
MRVRGMQRNWPHLGKWGLLFLGILIICSATDKFWVTVYYGVPVWREAKTTLFCASDAKGYDKEVHNVWATHACVPTDPNPQEVVLGNVTENFNMWKNDMVEQMHTDIISLWDQSLKPCVKLTPLCVTLNCTDFKANSTANSTTNSTTLKEETGAVQNCSFNMTTEVNDKKLKVHALFYRLDIVPISSDDSSNSSYRLINCNTSTIKQACPKVSWDPIPIHYCAPAGYAILKCNEKKFSGTGPCKNVSTVQCTHGIKPVVSTQLLLNGSLAKEGIIIRSQNISDNAKNIIVHLNESVHINCTRPNNNTRKSIHLGPGQAFYATGDIIGDIRKAHCNVSREQWNKTLIQVAKELQSHFPNKTIKFNSSSGGDLEITMHSFNCRGEFFYCDTSKLFNATVFNDTVFNATMFNNDSDKNIILPCKIKQIVRMWQGVGQAMYAAPIAGNIACNSTITGILLARDGGNGNDSSNDTEIFRPGGGDMRDNWRSELYKYKVVEIQPLGIAPTRAKRQVVKREKRAMGIGAMFLGFLAAAGSTMGAASIALTVQARQLLSGIVQQQNNLLQAIEAQQHLLQLTVWGIKQLQARVLAVERYLKDQQLLGLWGSSGKHICSTSVPWNSSWSNKSEGEIWDNMTWMEWEKEISNYSSTIYRLIEQSQIQQEKNEQELLSLDQWASLWNWFDITKWLWYIKIFIMIVGGLIGLRIVFTVLSIVNRVRKGYSPLSFQTPFPAPRGPDRPEETEEGGGEQDRGRSIRLVNGFSALIWDDLRNLCLFSYHHLRDLTLIVVRIVELLGRRGWEALKYLWSLPQYWSRELKNSAISLLNTTAVVVAEGTDRVIEALQRAGRAILNIPRRIRQGLERALL

SEQ ID NO: 278 - protein, 843 aa, HIV
MRVRGMQRNWQHLGKWGLLFLGMLITSSTANNLWVTVYYGVPVWKEANTTLFCASDAKAYDKEAHNVWATHACVPTDPNPQEIVMENVTENFNMWKNDMVEQMHEDIISLWDQSLKPCVKLTPLCVNLNCTMPIPNSNSTKATSNPLRKIKEQQNCSFNMTTVVNDKRREVHALFYRLDIVPINNGSDNKYRLINCNTSTIKQACPKVSWDPIPIHYCAPAGYAILKCNEKKFNGTGPCTNVSTVQCTHGNKPVVSTQLLLNGSLAEDRIVIRSQNISSNTKNIIVHLNESVQINCTRPNNNTRKSIHLGPGQAFYATGDIIGDIRKAHCNISGEQWNRTLEQVRTELTKLINKTVIFESPIGGDLEVTSHSFNCRGEFFYCNTSQLFNDTLPKNGTITLPCRIKQIINMWQKVGKAMYAAPIAGNITCNSNITGIILTRDSEDNNSSSNETFRPGGGDMRDNWRSELYKYKVVEIEPLGVAPTRAKRQVVKRERRAVGLGALFLGFLGAAGSTMGAASMTLTVQARQLLSGIVQQQNNLLQAIEAQQHLLQLTVWGIKQLQARVLAVERYLKDQQLLGLWGCSGKLICTTNVPWNSSWSNKSYDQIWENMTWMEWEKEVGQYSNKIYRLIEQSQNQQEQNELELLALDKWASLWSWFDISNWLWYIKIFIMIVGGLIGLRIVFAVLSIVNRVRQGYSPLSLQTLLPTTPRGQPDRPEGTEEEGGEQGRDRSVRLLSGLSTLIWDDLRNLCLFSYHRLRDLLLIAARVVELLGRGGWEALKYLWSLLQYWSQELKNSAISLLNTTAIVVAEGTDRVLEALQRVGRAILNIPRRIRQGLERALL

SEQ ID NO: 279 - protein, 859 aa, HIV
MRVKGIQTSWQHLWKWGTLILGLVIICSASKNMWVTVYYGVPAWEDADTILFCASDAKAYSPDKHNVWATHACVPTDPNPQEISLKNVTENFNMWKNNMVDQMHEDIISLWDESLKPCVKLTPLCVTLTCTNATLGNKTLGNNSTNSTLGNNSTIVDDISKEIKNCSFNITTEIRDKTKKEYALFYRPDIVPIGDDSNNSDYRLINCNVSTIKQACPKVSFEPIPIHYCAPAGFAILKCRDKDFNGTGPCKNVSTVQCTHGIKPVVSTQLLLNGSLAEGNITIKTENITDNTKNIIVQLNQPVEIRCTRPGNNTRKSISFGPGQAFIATGDIIGDIRQAHCNVSRANWTDILGEVKVKLEEVFNNTHITFKSSAGGDLEITTHSFNCGGEFFYCNTSNLFNTSDLFNTSRGNDTNTTITLPCKIKQIVRMWQRVGQAMYAPPIAGNITCVSNITGIILTRDGNNENVSETFRPGGGDMRDNWRSELYKYKVVKIKPLGIAPTWARRRVVGREKRAVGLGAMFLGFLGTAGSTMGAASITLTVQVRQLLSGIVQQQSNLLRAIEAQQHLLQLTVWGIKQLQARILAVERYLKDQQLLGIWGCSGKLICPTNVLWNTSWSNKTYDEIWGNMTWIEWDREINNYTQQIYSLIELSQTQQEKNEQDLLALDKWANLWSWFDITNWLWYIKIFIMIVGGLIGLRIVFAVISIVNRVRQGYSPLSLQTLIPNPTGADRPGEIEEGGGEQGRTRSIRLVNGFLALAWDDLRSLCLFSYHRLRDFGLIAARTVEILGRRGWEILKYLGNLICYWGQELQNSAISLFDAAAIAVANWTDRVAEVVQRIFRAFLNVPRRIRQGFERALL

SEQ ID NO: 280 - protein, 854 aa, HIV
MRVRGTQMNWSHLWKWGTLILGLVIICNASKDLWVTVYYGVPAWEDADTILFCASDAKAHSTEKHNVWATHACVPTDPNPQEIPLENVTENFNMWKNNMVQQMHEDIKSLWDESLKPCVKLTPLCVTLNCTNVTNNGTSEGTNITVSSKEEITNCSFDITTEIRDKKKKEYALFYKLDVMPIEGKNNSSNSSAYILINCNATTIKQVCPKVSFEPIPIHYCAPAGFAILKCRDKNFNGTGPCKNVSTVQCTHGIKPVVSTRLLLNGSLAEESIIIRSENITDNAKNIIVQLNKSVEIICTRPYNNTRKSIHFGPGQALFATGEIIGDIRQAHCNISRKNWNETLQNVTAKLQEYFPDSNITFNSSAGGDLEITTHSFNCGGEFFYCNTSELFNTSKLFNSSSGSDETITLPCRIKQIVRMWQKVAQAMYAPPIAGNITCKSNITGLLLTRDGSNNGNGSNNGNETFRPGGGNMKDNWRSELYKYKVVKIKPLGIAPSRARRRVVGREKRAVGLGAVFLGFLGTAGSTMGAASITLTVQVRQLLSGIVQQQSNLLRAIEAQQHMLQLTVWGIKQLQARVLALERYVKDQQLLGIWGCTGKLICPTNVPWNNSWSNKTFEEIWNNMTWIEWEREINNYTTYIYTLIEESQNQQEKNEQELLALDKWESLWNWFNISNWLWYIRIFIMIVGGLIGLRIVFAVLSIVNRVRQGYSPVSLQTRIPNPTGADRPGEIEEGGGEQDNTSSIRLVNGFLALIWDDLRSLCLFSYHLLRDFGLIVARTVETLEHRGWEILKYLKNLVCYWGQELKNSAINLLDTIAIAVADWTDRVIEVGQRVFRAFLNIPRRIRQGLERALL

SEQ ID NO: 281 - protein, 869 aa, HIV
MRVRGMHRNWQHLWNWGTLILGLVIICSASSNLWVTVYYGVPAWEDADTILFCASDAKAYSNEKHNVWVTHACVPTDPNPQEIPLENITENFNMWKNNMVEQMHEDIISLWDESLKPCVKMTPLCVTLTCNNATINVTNTNTTQSNTNSSTNVTKTNNITVKEVEDMRNCSFNETTEIRDKTKQEYALFYKTDVVQMGKEGNKTTYKLINCNVSTIRQACPKVTFEPIPIHYCAPAGFAILKCRDKNFNGTGPCKNVSTVQCTHGIKPVVSTQLLLNGSLAEKEIIIRSENLTDNTKNIIVQLNSTVQITCNRPNNNTRRGIHLGPGQVFFATGDIIGDIRQAHCNISGIKWGEVVRNVSAKLKEIYNKSITFSPPIGGDLEITTHSFNCRGEFFYCNTSKLFNSTFSNNNSTNNDTSLENNGTITLPCKIKQIVRMWQRVGQAMYAPPIEGNITCISNITGLILTRDGHNGHNQSNNETFRPTGGDMRDNWRSELYKYKVVRIKPLGIAPTKARRRVVGREKRAVGLGAVFLGFLGAAGSTMGAASITLTVQVRQLLSGIVQQQSNLLRAIEAQQHLLQLTVWGIKQLQARVLALERYLKDQQLLGIWGCSGKLICPTNVPWNTSWSNKTYSEIWDNMTWLDWDREISNYTDLIYSLIEESQTQQEKNEQDLLALDKWESLWSWFNISNWLWYIKIFVMVVGGLIGLKIVFSVLSIVNRVRQGYSPLSLQTLIPSPRGADRPGGIEEGGGEQDRTRSIRLVSGFLALAWDDLRSLFLSSCHRLRDFILIAARTVETLGRRGWELLKYLGNLVCYWGQEIKNSAISLLDTIAIAVGNWTDRVIEVGQRAVRAVLNIPRRIRQGFERALL

SEQ ID NO: 282 - protein, 873 aa, HIV
MRVMGIRKNWRHLWRWGTMLLGMLMICRAVEDLWVTVYYGVPVWKEATTTLFCASDAKAYETEVHNVWATHACVPTDPSPQEMVLKNVTENFNMWKNEMVNQMHEDVISLWDQSLKPCVKLTPLCVTLECTDAKNSSTNATNGAHNNTYLEGMDKEIKNCSFNTTTVIRDRKQTGYALFYRLDVVPLGERNSSGNSSGYYTLINCNTSAITQACPKVSFDPIPIHYCTPAGYALLKCNNKTFNGTGPCNNVSTVQCTHGIKPVVSTQLLLNGSLAEDKIIIRSENLTNNAKTIIVHLNQSVEIVCTRPNNNTRKSIRIGPGQTFYATGEIIGDIRQAYCIINGSQWNDTLQRVSKKLAEHFPNKTIIFNSSSGGDLEITTHSFNCRGEFFYCNTSKLFNSTYMSNGTFMFNGTDSNSTSNITIPCRIKQIINMWQEVGRAMYAPPIAGNITCKSNITGLLLVRDGGEGNETQNDTETFRPGGGDMRDNWRSELYKYKVVEIKPLGVAPTGAKRRAVEREKRAAGLGALLFGFLGAAGSTMGAASITLTVQARQLLSGIVQQQSNLLRAIEAQQHLLQLTVWGIKQLQTRVLAIERYLKEQQLLGLWGCSGKLICTTTVPWNSSWSNKSQEQIWNHTTWMQWDKEISNYTDLIYSLIEESQNQQERNEKDLLELDSWNNLWNWFNISNWLWYIKIFIIIVGGLIGLRIIFAVLSIVNRVRQGYSPLSFQIPTQNPGGLDRLGRIEEEGGEQDKDRSIRLVNGFLALAWDDLRNLCLFSYHRLRDFILVVARVVELLERNILRGLQRGWEALKYLGSLVQYWGQELKKSAISLLDTIAIAVAEGTDRIIELVQRLFRGIGNVPRRIRQGFEAALQ

SEQ ID NO: 283 - protein, 854 aa, HIV
  misc_feature (622)..(622): Xaa can be any naturally occurring amino acid
MRVTGIRKNWRHLWRWGTMLIGMLMICSTVGNLWVTVYYGVPVWKEATTTLFCASDAKAYDTEVHNVWATHACVPTDPNPQEMFLENVTENFNMWKNEMVDQMHEDVIGLWDQSLKPCVKLTPLCVTLECRDVNNTVNNNTVNSTDKEMKNCSFNATTVVRDKKQTVYALFYRLDIVPLTEKNSSGNSSEYYRLINCNTSAITQACPKVSFDPIPIHYCTPAGYALLKCNNKTFNGTGPCNNVSTVQCTHGIKPVVSTQLLLNGSLAEGEIIIRSENLTNNIKTIIVHLNQSVEMVCTRPNNNTRKSIRIGPGQTFYATDIIGDIRQAHCNISGDKWNETLQRVSKKLAERFPNKTIKFASSSGGDLEITTHSFNCRGEFFYCNTSGLFNGTYMSNGTKSNSSIITIPCRIKQIINMWQEVGRAMYAPPIKGNITCKSNITGLLLVRDGGNPNGTEETFRPGGGDMRDNWRSELYKYKVVEIKPLGIAPTAAKRRVMEREKRAVGIGAVFLGFLGAAGSTMGAASITLTVQARQLLSGIVQQQSNLLKAIEAQQHLLQLTVWGIKQLQTRVLAIERYLKDQQLLGIWGCSGKLICTTAVPWNSSWSNKSQKEIWENMTWMQXDKEISNYTNTIYRLLEDSQNQQENNEKDLLALDSWKNLWNWFDITNWLWYIKIFIMIVGGLIGLRIIFAVLSIVNRVRQGYSPLSFQIPTPNPGGPDRLGRIEGEGGEQDKDRSVRLVNGFLALAWDDLRNLCLFSYHRLRDFILVAARVVELLGRNSLRGLQRGWEALKYLGSLVQYWGQELKKSTISLVDTIAIAVAEGTDRIIELVQRLFRGIYNIPRRIRQGFEAALQ

SEQ ID NO: 284 - protein, 859 aa, HIV
MRVTGIRKNYRHLWRWGTMLLGMLMISSAVGNLWVTVYYGVPVWKEATTTLFCASDAKAYDTEVRNVWATHACVPADPNPQEMVLENVTENFNMWKNEMVNQMQEDVISLWDQSLKPCVKLTPLCVTLECRNVSSNSNDTYHETYHESMKEMKNCSFNATTVVRDRKQTVYALFYRLDIVPLTKKNYSENSSEYYRLINCNTSAITQACPKVTFDPIPIHYCTPAGYAILKCNDKIFNGTGPCHNVSTVQCTHGIKPVVSTQLLVNGSLAEGEIIIRSENLTNNVKTIIVHLNQSVEIVCTRPGNNTRKSIRIGPGQTFYATGDIIGDIRQAHCNISEDKWNETLQRVSKKLAEHFQNKTIKFASSSGGDLEVTTHSFNCRGKFFYCNTSGLFNGTYTPNGTKSNSSSIITIPCRIKQIINMWQEVGRAMYAPPIEGNITCKSNITGLLLVRDGGTEPNDTETFRPGGGDMRNNWRSELYKYKVVEIKPLGVAPTTAKRRMVEREKRAVGIGAVFLGFLGVAGSTMGAASITLTVQARQLLSGIVQQQSNLLRAIETQQHLLQLTVWGIKQLQTRVLAIERYLKDQQLLGIWGCSGKLICTTAVPWNSSWSNKSQKEIWDNMTWMQWDKEISNYTNTIYRLLEESQNQQERNEKDLLALDSWKNLWSWFDITNWLWYIKIFIIIVGGLIGLRIIFAVLSIVNRVRQGYSPLSFQTLTPNPGGPDRLGRIEEEGGEQDRDRSIRLVNGFLALAWDDLRNLCLFSYHRLRGFILVAARVVELLGRNSLRGLQRGWEALKYLGSLVQYWGQELKKSTISLVDTIAIAVAEGTDRIIELVQGLCRAIYNIPRRIRQGFEAALQ

SEQ ID NO: 285 - protein, 864 aa, HIV
MRVRGTRRNYQQWWIWGVLGFWMLMICNVEGNLWVTVYYGVPVWKEAKTTLFCASDAKAYETEVHNVWATHACVPTDPSPQEIVMENVTENFNMWNNDMVNQMHEDVTSLWDQSLKPCVKLTPLCVTLECRNVSSNGNGTYNETYNESVKEIKNCSFNATTLLRDRKKTVYALFYRLDIVPLNDENSGENSSEYYRLINCNTSAITQACPKVTFDPIPIHYCTPAGYAILKCNDKIFNGTGQCHNVSTVQCTHGIKPVVSTQLLLNGSLAEREIIIRSENLTNNVKTIIVHLNQSVEIVCTRPNNNTRKSIRIGPGQTFYATGDIIGDIRQAHCNISKDAWYETLQRVSKKLAEHFPNKTIKFASSSGGDLEITTHSFNCRGEFFYCNTSGLFNGTYNGTYMLNGTRDNSSSIITIPCRIKQIINMWQEVGRAMYAPPIEGNITCKSNITGLLLVRDGGRTEPNNTEIFRPGGGDMRNNWRNELYKYKVVEIKPLGVAPTAAKRRVVEREKRAVGLGAVFLGFLGAAGSTMGAASITLTVQARQLLSGIVQQQSNLLRAIEAQQHMLQLTVWGIKQLQTRVLAIERYLKDQQLLGIWGCSGKLICTTAVPWNSSWSNKSQQEIWDNMTWMQWDKEISNYTNTIYRLLEDSQNQQERNEKDLLALDSWKNLWSWFDITNWLWYIKIFIMIVGGLIGLRIIFAVLSIVNRVRQGYSPLSFQILTPNPGGPGRLGRIEEEGGEQDKTSSIRLVNGFLALAWDDLRNLCLFSYHRLRDFILLTARGVELLGRNSLRGLQRGWEALKYLGSLVQYWGLELKKSTISLVDAIAIAVAEGTDRIINRVQGICRAIHNVPRRIRQGFEAALQ

SEQ ID NO: 286 - protein, 866 aa, HIV
MRVRGTLRNYQQWWIGGVLGFWMLMNCNVGGNLWVTVYYGVPVWKEAKTTLFCASDAKAYETEVHNVWATHACVPTDPNPHEMFMENVTENFNMWNNDMVNQMHEGVISLWDQSLKPCVKLTPLCVTLECKNFRNVSSNGTETDNEEIKNCSFNATTVLRDKEKKVSALFYRLDIVPLNDKNSSEISGKNSSEYYRLINCNTSAITQACPKVTFDPIPIHYCAPAGYAILKCNNKTFNGTGQCNNVSTVQCTHGIKPVVSTQLLLNGSLAEGEIIIRSENLTNNVKTIIVHLNQSVEIVCTRPNNNTRKSIRIGPGQTFYATGDIIGDIRQAHCNISKNKWNETIQRVSEKLAEHFPNKTITFAPSSGGDLEITTHSFNCRGEFFYCNTSGLFNSTYMFNGTYMFNGTKDNSSSITIPCRIKQIINMWQEVGRAMYAPPIEGNITCKSNITGLLLVRDGGTESNKTKVEIFRPGGGDMRNNWRNELYKYKVVEIKPLGVAPTAAKRRVVERGKRAVGLGAVFLGFLGAAGSTMGAASITLTVQARQLLSGIVQQQSNLLRAIEAQQHLLQLTVWGIKQLQTRVLAIERYLKDQQLLGIWGCSGKLICTTAVPWNSSWSNKSQQEIWDNMTWMQWDKEISNYTNTIYRLLEDSQNQQERNEKDLLALDSWKNLWSWFDITNWLWYIKIFIMIVGGLIGLRIIFAVLSIVNRVRQGYSPLSFQILTPNPGGPGRLGRIEEEGGEQDKNRSIRLVNGFLALAWDDLRNLCLFSYHRLRDFILLTARGVELLGRNSLRGLQKGWEALKYLGSLVQYWGLELKKSAISLFDTIAIAVAEGTDRIVNIVQGICRAIRNIPRRIRQGFEAALQ

SEQ ID NO: 287 - protein, 864 aa, HIV
MKVKGTQTNWQNLWRWGLLMTFGTLMICSATDNYWVTVYYGVPVWRDAETTLFCASDAKAYSTEKHNVWATHACVPTDPNPQEIHLRNVTENFNMWKNNMVEQMHEDIISLWDESLKPCVKLTPLCVTLNCTDIKESELKHITNKGNDSNSNSTRKEMLEQMKNCSYNATTELRDKHKKMYSFFYRLDIAQIDRKINKSYGYYSLINCNTSTLTQACPKVTFEPIPIHYCAPAGFAILKCRDKNFTGIGTCKNVSSVQCTHGIKPVVSTQLLLNGSLAEGDIMIRSENITDNAKDIIVQLKEPVNITCIRPSNNTRESVRIGPGQTFFATGDIIGDIRKAHCLINETQWNKTLERVAEKLRKHFNKTTIEFKPSSGGDLEIATHSFNCAGEFFYCNTSDLFNSIWNSTRENTNNTNANYTDYIIPCRIKQIVRMWQRVGQAMYAPPIPGVISCTSNITGLIITRDGGSNNTGSETFRPTGGNMKNNWRSELYKYKVVEIEPLGVAPTRARRRVVQREKRAVGMGALFLGFLGAAGSTMGAASITLTVQARQLLSGIVQQQSNLLKAIEAQQHMLRLTVWGIKQLQARVLAVERYLKDQQILGIWGCSGKLICTTNVPWNSSWSNKSQSEIWDNMTWLEWDREINNYTQVIYRLLEESQNQQEKNEQDLLALDSWASLWNWFSISSWLWYIKIFIMIVGGLIGLRIIFAVLSLVNRVRQGYSPLSFQTLIPNPRGPDRPEETEEGGGEQDKTRSVRLVSGLFALAWDDLRNLCLFSYHLLRNFILIAARTVETLGRRVWQSLKYLWGLVQYWGQELRNSAISLFDTTAVAVAEGTDRIIEALQRVGRAFLHVPRRIRQGLERALL

SEQ ID NO: 288 - protein, 842 aa, HIV
MRVKEIQRNWQNLWRWGLMILGMLMICNAAENLWVTVYYGVPVWKEAETTLFCASDAQAYSKEKHNVWATHACVPTDPNPQEIGLENVTENFNMWKNNMVEQMHKDIISLWDQSLKPCVKLTPLCVTLDCHRVNNSKPNTTSDGSEVRMQNCSFNITTELRDKHQKVYSLFYRSDIVSINASNNEYRLINCNTSAITQACPKVTFEPIPIHYCAPAGFAILKCRDKEFNGTGICKNVSSVQCTHGIRPVVSTQLLLNGSLAEEDIIIRSENITNNVKVIIVQLADPVTIDCVRTGNNTRTSVRIGPGQTFYATGDIIGDIRKVHCQINGTKWNEILGKVAEKLKGHFNNKTIIFRPSSGGDVEITTHSFNCGGEFFYCDTSGLFNNTWNGTWENNNNSIENYTIHCRIKQIVRMWQRVGQAMYAPPIPGEIRCRSNITGLILTRDGGSDDNETFRPTGGNMKDNWRSELYKYKVVKIEPLGVAPTRARRRVVEREKRAVGMGALFLGFLGAAGSTMGAASITLTVQARQLLSGIVQQQSNLLRAIEAQQHLLKLTVWGIKQLQARVLAVERYLKDQQLLGIWGCSGKLICTTNVPWNSSWSNKSQHEIWENMTWLEWDREISNYTQLIYRLIEESQNQQEKNEQDLLALDSWASLWSWFDITNWLWYIRLFIMIVGGLIGLRIIFAVLSVVNRVRQGYSPLSFQTLTPNPREPDRPEGIEEGGGEQDKVRSIRLVSGFFALAWDDLRNLCLFSYHRLRDFILIAARTVEILGHRVWQILKYLGNLAQYWGQELKNSAISLLNTTAIVVAEGTDRVIEVLQRAGRAILHIPRRIRQGFERALL

SEQ ID NO: 289 - protein, 840 aa, HIV
MTVTGIQRNCRQWWIWGILGFWMLMICNAREKLWVTVYYGVPVWKETTTTLFCASDAKAYKAEAHNIWATHACVPTDPNPREIVLENVTENFNMWKNGMVDQMHEDIISLWDQGLKPCIKLTPLCVTLNCNGINATNDTVGDPRMTNCSFNTTTEVKDKKKQEYALFYKLDVVQIGDSNTSYRLINCNTSAITQACPKVTFEPIPIHYCAPAGFAIIKCNDRKFNGTGPCKNISTVQCTHGIKPVVSTQLLLNGSLAEEEIIIRSENLTDNAKNIIVQLNESVTINCVRPNNNTRRSIRIGPGQTFYATDIIGNIRQAYYNISGTEWNKTLQQVAKKLGDLFNRPTIIFKPSSGGDPEITTHTFNCGGEFFYCNTSELFNSTWTSNNTSTGVNGSTITLPCRIRQIINMWQGVGKAIYAPPIAGLINCSSNITGLVLTRDGGANNNSQNETFRPGGGDMRDNWRSELYKYKVVKIEPIGLAPTTAKRRVVEREKRAIGLGAVFLGFLGAAGSTMGAASLTLTVQARQVLSGIVQQQNNLLRAIEAQQHLLQLTVWGIKQLQARVLAVESYLKDQQLLGIWGCSGRHICTTNVPWNSSWSNKSLGEIWDNMTWMEWEREIDNYTGLIYNLIEESQIQQEKNEQELLQLDKWASLWSWFSITNWLWYIKIFIMIVGGLIGLRIVCAVLSLVNRVRQGYSPLSLHTLLPAPRGPDRPEGIEEEGGERGRGRSIRLVDGFLTLIWDDLRNLCLFSYHRLRDLILIATRIVELLGRMGWEAIKYLWNLLQYWIQELKNSAISLLDTIAIEVAGWTDRVIEIVQRAVRAILNIPTRIRQGLERALL

SEQ ID NO: 290 - protein, 851 aa, HIV
MKVMGIQRNYPQWWIWGILGLWMLMICNGNLWVTVYYGVPVWKEATTTLFCASDAKYYKEEAHNIWAAHACVPTDPNPQELVLENITENFNMWKNDMVDQMHEDIISLWDQSLKPCVKLTPLCVTLNCSDVASNANVTSGTNSTDSDTGMKNCSFNITTEIRDKQKKEHALFYKLDVVQIDGSNTSYRLINCNTSAIKQACPKVTFEPIPIHYCAPAGFAILKCNNKTFNGTGPCDNVSTVQCIHGIKPVVSTQLLLNGSLAEEEIIIRSENITSSLKTIIVQLNESVTINCTRPNNNTRKSIRIGPGQTFYATGDIIGDIRQAHCNISGTEWNKTLQQVAKKLRDLLNKTKIIFKPSSGGDPEVTTHTFNCGGEFFYCNTTILFNNSEWTSNNTGNTSSGVNDSTIIIPCRIKQIVNMWQKVGKAIYAPPIAGLISCSSNITGLLLTRDRDGGANNTSQNETFRPGGGDMRDNWRSELYKYKVVKIEPLGLAPTKAKRRVVEREKRAIGLGAMFLGFLGAAGSTMGAASLTLTVQARQLLSGIVQQQNNLLKAIEAQQHLLQLTVWGIKQLQARILAVESYLKDQQLLGIWGCSGKLICTTNVPWNDSWSNKSLDAIWNMTWMDWEREIDNYTGLIYSLIEESQNQQEKNEKELLELDKWASLWNWFSITNWLWYIRIFIMIVGGLIGLRVVFAVLSLVNRVRQGYSPLSFQTLLPAPRGPDRPEGIEEEGGEPGRDRSIRLVNGFSAIVWDDLRNLCLFSYHRLRDLILIATRIVELLGRRGWEALKYLWNLLQYWIQELKNSAISLLDTTAVAVAEGTDRAIEIVQRAVRTVINIPRRIRQGAERAFL

SEQ ID NO: 291 - protein, 865 aa, HIV
  misc_feature (208)..(208): Xaa can be any naturally occurring amino acid
  misc_feature (779)..(779): Xaa can be any naturally occurring amino acid
  misc_feature (801)..(801): Xaa can be any naturally occurring amino acid
  misc_feature (845)..(845): Xaa can be any naturally occurring amino acid
MRVKETQRSWHNLWRWGLMIFGMLMICNATDNLWVTVYYGVPVWRDADTPLFCASNAKAYSTEKHNVWATHACVPTDPNPQEIHLENVTENFNMWENNMVEQMHEDIISLWDESLKPCIKLTPLCVTLNCTNVKKNCTNVEKNNTTLGNSNCTSNSTVEGQAEMKNCSFNITTEIRDKQKQEYALFYKLDVVPLNDNDNTSYRLINCXVSTVKQACPKVTFEPIPIHYCAPAGYAILKCNDKKFNGTGPCTNVSTVQCTHGIRPVVSTQLLLNGSLAEGEVRIRSKNITDNAKTIIVQFDSPVHINCTRPNNNTRKSIRIGPGQAFYATGAIIGDIRQAHCVINATIWNNTLKRVVEQLRQIEIFNKTTIIFNSSSGGDLETTTHSFNCGGEFFYCNTSKLFNSTWNSNGTVGNSTIGPNDNITLSCKIKQIVRMWQRVGQAMYAPPIQGKIMCNSTITGLLLTRDGGKNSSKTETFRPIGGDMKDNWRSELYKYKVVEIKPLGVAPTRAKRRVVEREKRAVGIGAVLLGFLGAAGSTMGAASITLTVQARQLLSGIVQQQSNLLKAIEAQQHLLKLTVWGIKQLQARVLAIERYLKDQQLLGIWGCSGKLICTTNVPWNVSWSNKSYNEIWDNMTWIEWEREINNYTQTIYNLLEESQNQQEKNEQDLLALDKWASLWTWFDITNWLWYIKIFIMIVGGLIGLRIVFAVLSIVNRCRQGYSPVSLQTLIPSHKEADSPGGIEEGGGEQDRTRSIRLVSGFLALAWDDLRNLCLYSYHXLRDLILIVTRILGTLGRRGWEXLKYLGNLTQYWSQELKNSAISLLNTTAIVVAEGTDRIIEVIHRXLRAVLHIPRRIRQGLERALL

SEQ ID NO: 292 - protein, 849 aa, HIV
  misc_feature (142)..(142): Xaa can be any naturally occurring amino acid
  misc_feature (153)..(153): Xaa can be any naturally occurring amino acid
  misc_feature (182)..(182): Xaa can be any naturally occurring amino acid
  misc_feature (204)..(204): Xaa can be any naturally occurring amino acid
  misc_feature (291)..(291): Xaa can be any naturally occurring amino acid
  misc_feature (358)..(358): Xaa can be any naturally occurring amino acid
  misc_feature (403)..(403): Xaa can be any naturally occurring amino acid
  misc_feature (412)..(412): Xaa can be any naturally occurring amino acid
  misc_feature (490)..(490): Xaa can be any naturally occurring amino acid
  misc_feature (560)..(560): Xaa can be any naturally occurring amino acid
  misc_feature (641)..(642): Xaa can be any naturally occurring amino acid
  misc_feature (768)..(768): Xaa can be any naturally occurring amino acid
  misc_feature (788)..(788): Xaa can be any naturally occurring amino acid
MRVKETQRNWHNLWKWGLMIFGMLMICNAAEDLWVTVYYGVPVWEDADTTLFCASDAKAYSTEKHNVWATHACVPTDPNPQEIPLGNVTENFNMWKNSMVEQMHEDIISLWDESLKPCIKLTPLCVTLNCTDVRNTTVNVNXEAEIKNCSFNXTTEIKDKKKKEFALFYRLDVVPLNGNSNXSSSNASEYRLINCNVSAVKQAXPKVTFEPIPIHYCAPAGFAILKCRDEKFNGTGPCQNVSTVQCTHGIKPVVSTQLLLNGSLAEGGVRIRSENFTNNAKTIIVQLDSPXRINCTRPNNNTRKSIHIGPGQAFYATGDIIGDIRQAHCNVSKAEWNKALQKVAGQLRETFSNKTIIXTNHSGGDIEITTHSFNCRGEFFYCNTTNLFKGTWPGGIEQNETNXNGTITLQCXIKQIVNMWQRVGQAMYAPPIQGELRCDSNITGLLLTRDGGVNNTNNETFRPAGGDMRDNWRSELYKYKVVEIKPLGVXPTKARRRVVEREKRAVGIGAVFFGFLGAAGSTMGAASITLTVQARQLLSGIVQQQSNLLKAIEAQQHLLXLTVWGIKQLQARVLAVERYLKDQQLLGIWGCSGKLICTTNVPWNNSWNNKTYDDIWNNMTWIEWEREISNYTQTIYTLLEXXQNQQEKNEQDLLALDKWASLWNWFDISNWLWYIKIFIMIVGGLIGLRIIFAVLSIVNRCRQGYSPLSLQTLTPNHKEADRPGGIEEGDGEQGRTRSIRLVSGFLALIWDDLRNLCLFCYHRLRDFXLIAARIVETLGHRGWEILKXLGNLAQYWGQELKNSAISLLNVTAIAVAEGTDRIIEVAQRVLRAIIHIPRRIRQGFEIALL

SEQ ID NO: 293 - protein, 845 aa, HIV
MRARGTQKNWHDLWRWGLMISGMLMICNATDNLWVTVYYGVPVWKDANTTLFCASDAQAYSPEKHNVWATHYCVPTDPNPQEILLGNVTENFNMWKNNMVEQMHEDIISLWDESLKPCVKLTPLCVTLNCAEVTSYNTTEMKNCSFNVTTELIDRRKQEYALFYKLDIVPINDNNNSSNVSDYRLINCNVSTIKQACPKVTFEPIPIHYCAPAGFAILKCRDKEFNGTGPCKNVSTVQCTHGIKPVVSTQLLLNGSLAEEKVKIRSENFTNNAKTIIVQFNNTVRINCTRPGNNTRKSIHLGPGHAFYATGAIIGDIRQAHCKVSKAEWLNTLQQVATQLRGKFNKTIIFDNPSPGGDIEITSHSFNCRGEFFYCNTSGLFNNTWLFNSTWNSSQELNGTEPNITLPCRIKQIVRMWQRVGQAMYAPPIQGEIRCDSNITGLLLTRDGGLNSTNETFRPTGGDMRDNWRSELYKYKVVEIKPLGVAPTRAKRRVVEREKRAVGIGAVLFGFLGAAGSTMGAASITLTVQVRQLLSGIVQQQSNLLKAIEAQQHLLKLTVWGIKQLQARVLAVERYLKDQQLLGIWGCSGKLICTTNVPWNISWSNKSYDEIWDNMTWIEWEREIDNYTQTIYTLLEESQTQQEKNEQDLLSLDKWASLWSWFDITNWLWYIKIFIMIVGGLIGLRIIFAVLSVVNRCRQGYSPLSFQTLNPTQQEADRPGGIEEGGGEQGRTRSIRLVSGFLAIAWDDLRNLCLFSYHRLRDFILIVARIVETLGHRGWEILKYLGNLTQYWGQELKNSAINLLNTTAIAVAEGTDRIIEIVQRVLRGILHIPRRIRQGLERALL

SEQ ID NO: 294 - protein, 854 aa, HIV
  misc_feature (150)..(150): Xaa can be any naturally occurring amino acid
MRVRGMQRNWQHLGTWGLLFLGILIICNATENLWVTVYYGVPVWKEANPTLFCASDAKAYDREVHNVWATHACVPTDPNPRELDLENVTENFDMWKNNMVEQMHTDVISLWDQSLKPCVKLTPLCVTLNCTDVTNNATNNATGTNSTQSXPLKEELGEIKNCSFKMTTEVRDKQKEVQALFYKSDIVPINNGDGDNSTYRLIHCNTSTITQACPKVSWDPIPIHYCAPAGYAILKCKDKEFNGTGPCKNVSTVQCTHGIKPVVSTQLLLNGSLAEEEIIISSQNISDNAKNIIVHLKEPVWINCTRPNNNTRKSIHLGPGQAFYATGDIIGDIRKAHCNVSRTQWNNTIEQVKKRLGSYFENGTTIRFNTSSGGDPEITMHSFNCRGEFFYCNTSKLFDEGLFNTTDDNDTIILPCRIKQIVNMWQEVGRAMYAAPIAGNINCNSTITGLILTRDGGKNTTGNETFRPGGGNMKDNWRSELYKYKVVEIQPLGVAPTTAKRQVVQRERRAVGMGALFLGFLGAAGSTMGAASITLTVQARQLLSGIVQQQNNLLRAIEAQQHLLQLTVWGIKQLQARVLAVERFLSDHQLLGLWGCSGKLICTTDVPWNSSWSNKSLEAIWNNMTWMEWEREINSYSNEIYRLIEESQRQQEKNEHELLKLDKWASLWNWFSISNWLWYIRIFIMIVGGLIGLRIVFAVLSIVNRVRKGYSPLSLQTHLPSPREPDRPEGIEEGGGEQGKDRSVRLVNGLLALIWEDLRNLCLFSYHHLRDLLLIVTRIVGLLGRTGWEVLKYWWNLLQYWSQELKNSAISSLNTTAIVVAEGTDRVIEALQRIGRAILNIPRRIRQGLERALL

SEQ ID NO: 295 - protein, 843 aa, HIV
  misc_feature (206)..(206): Xaa can be any naturally occurring amino acid
MRVRGMQRNWQHLGNWGFLFLGILIICNATENLWVTVYYGVPVWKEATTTLFCASDAKSYEREVHNVWATHACVPTDPNPQEVVLENVTENFDMWKNNMVEQMHTDIISLWDQSLKPCVKLTPLCVTLNCSNANATANNATANGTQNNTLEEEPGAIQNCSFNMTTEIRDKQLKVHALFYRLDIVPIGNGSETYRLINCNTSTITXACPKVSWDPIPIHYCTPAGYALLKCNDKKFNGTGPCQNVSTVQCTHGIKPVVSTQLLLNGSLAEEDIIIRSQNISDNTKTIIVHLNESVQINCTRPNNNTRKSIQLGPGRAFYATGDIIGDIRKAHCNVSGAQWSKTVEQVKAKLRSQFNKTIKFNSSSGGDPEITMHSFNCRGEFFYCNTSGLFNDTISNDTIILPCKIKQIVNLWQEVGRAMYAAPIEGNITCNSNITGLLLTRDGGLNETNQTETFRPGGGNMKDNWRSELYKYKVVEIEPLGVAPTRAKRQVVTREKRAVGIGALFLGFLGAAGSTMGAASVTLTVQARQLLSGIVQQQNNLLQAIEAQQHLLQLTVWGIKQLQARVLAVERYLKDQQLLGLWGCSGKLICATNVPWNSSWSNKSQEEIWNNMTWMQWEKEISNYSHAIYRLIEDSQNQQEKNEQELLALDKWASLWNWFDISKWLWYIRIFIMIVGGLIGLRIVFAVLSIVNRVRKGYSPLSLQTHIPSPREPDRPEGIEEGGGEQGKVRSVRLVNGLLTLIWDDLRSLCLFSYHRLRDLLLVVTRIVELLGRRGWEALKYWWNLLQYWSRELKNSAISLLNTTAIVVAGGTDRILEALQRIGRAVLNAPRRVRQGLERALL

SEQ ID NO: 296 - protein, 846 aa, HIV
MRVRGMQRIWQQRLGTWGLLFLGILIICNAKDKLWVTVYYGVPVWKEATTTLFCASDAKAYDKEVHNVWATHACVPTDPSPQEVPLVNVTENFNMWKNDMVEQMHTDIISLWDQSLKPCVKLTPLCVTLNCTNANVTSNINSTLKEEPGAIQNCSFNMTTEVTDKQQKVRALFYRLDIVPISNGNSSGNNSSGTYRLINCNTSTITQACPKVSWEPIPIHYCTPAGYAILKCNDKEFNGTGPCTNVSTVQCTHGIKPVVSTQLLLNGSLAEQDIIIKSQNISDNTKTIIVHLNESIPIKCTRPNNNTRKSIQLGPGRAFFTTGDIIGDIKKAHCNISGAQWNRTLQRVREKLKLHFHNATIKFKSSSGGDPKITMHSFNCRGEFFYCNTTQLFNDAVSSDTIILPCKIKQIINMWQEVGRAMYAAPIAGNITCNSNITGLLLVRDGGNNNQTNNTETFRPGGGNMKDNWRNELYKYKVVEIEPLGVAPTRAKRQVVKREKRAAGIGAVLIGFLGAAGSTMGAASMTLTVQARQLLSGIVQQQSNLLRAIEAQQHLLQLTVWGIKQLQARVLAVERYLRDQQLLGIWGCSGKLICTTNVPWNASWSNKTENEIWGNMTWIQWEKEISNYSDEIYRLIEKSQNQQEKNEQELLALDKWASLWTWFDITKWLWYIKIFIMIVGGLIGLRIVFTVLSLVNRVRKGYSPLSLQTHLPSPRELDRPGEIKEGGGEQGRDRSVRLVNGFLALFWNDLRSLCLFIYHHLRDLLLIVTRIVEILGRRGWAALKYLGNLTQYWSQELKSSAISLLNTTAIVVAEGTDRIIEALQRAGRAIRNIPRRIRQGFERALL

SEQ ID NO: 297 - protein, 870 aa, HIV
MRVRGIQMNWQNLWKWGTLILGLVIICNASDKLWVTVYYGVPVWKDAETTLFCASDAKAYDTEKHNVWATHACVPTDPNPQEIKLPNVTEEFNMWKNKMVEQMHTDIISLWDQSLKPCVSLTPLCVTLHCNNINITNNNFTINNNSTMRGEMKNCSYNMTTGLSDRRLKVYSLFYKLDIEPLGENSNSSNSSSNEYRLISCNTSVVKQACPKVTFEPIPIHYCAPAGFAILKCNDEEFNGTGPCKNVSSVQCTHGIKPVVSTQLLLNGSLAEGGEIKIRSENISNNAKTIIVQLKDPVRINCTRPNNNTRKSIRIGPGQTFYATGDIIGDIRQAHCNISKKDWNNTLQQVAEKLRTYFNNNTKIIFANHSGGDVEITTHSFNCGGEFFYCNTSALFNSTWEGNNTSTQGSNDTGSNDTITLPCRIKQFVNIWQRVGQAIYAPPIQGVIRCDSNITGLLLTRDGGDNDTTRANETFRPGGGDMKDNWRSELYKYKVVKIEPLGVAPTKAKRRVVAREKRAALGAVFLGFLGAAGSTMGAASITLTVQARQLLSGIVQQQSNLLMAIQAQQHMLKLTVWGIKQLQARVLAIERYLKDQQLLGIWGCSGKLICATNVPWNSTWSKDKNQSEIWDNMTWLQWDKEISNYTDEIYRLLEESQNQQEKNEQDLLALDQWANLWNWFDISNWLWYIKIFIMIVGGLIGLRIVFAVLSIVKRVRQGYSPLSFQTLTHPQEEPDRPERIEEGGGEQGRDRSIRLVSGFLALAWDDLRSLCLFSYHRLRDFILIAARTVELLGHSSLKGLRLGWEGLKYLGNLLLYWVRELRNSAVSLLDAIAVAVAGWTDRVIETGQRVGRGILHIPRRIRQGLERVLQ

SEQ ID NO: 298 - protein, 870 aa, HIV
MKVRGIQMNWQNLWKWGTLILGLVIICSASNNLWVTVYYGVPVWKDADTTLFCASDAKAYDTEKHNVWATHACVPTDPNPQEINLVNVTEQFNMWKNKMVEQMHTDIISLWDQSLKPCVSLTPLCITLNCTDLTNTTHNNSTRKYTTYDNSTMDGKEELKNCSYNMTTELRDRRRRVYSIFYKLDIVPIEGNNSSRSNFSEYRLINCNTSVIKQACPKVSFEPIPIHYCAPAGFAILKCNDKEFNGTGPCKNVSSVQCTHGIKPVVSTQLLLNGSLAEEKVQIRSENFSNNAKTIIVQFTEAVGINCTRPNNNTRKSIRIGPGQAFYATGEIIGEIRKAHCTINRTEWTKALGKVAEKLGQYLTNETTTIKFANHSGGDLEVTTHSFNCGGEFFYCNTSELFNSTWTNDTNSTQGSNDTTPIILPCRIKQIINMWQRVGQAIYAPPIEGVIRCESNITGLLLTRDGGNNRTSEIFRPGGGDMRDNWRSELYKYKVVKIEPLGVAPSKARRRVVTREKRAVGIGAVFLGFLGAAGSTMGAASLTLTVQARNLLSGIVQQQNNLLRAIEAQQQLLKLTVWGIKQLQARVLAVERYLKDQQLLGIWGCSGKLICTTNVPWNSSWSNKSQSEIWDNMTWLQWDKEISNYTEIIYRLIEESQNQQEKNEQDLLALDQWASLWNWFSISKWLWYIKIFIMIVGGLIGLRIIFAVLSIVNKVRQGYSPLSFQTLTPHQREPDRPERIEEGGGEQDNNRSIRLVSGFFALAWDDLRSLCIFSYHRLRDFVLIATRTVELLGHSSLKGLRLGWEGLKYLWNLLLYWGRELKNSAISLLDRTAIVVAEWTDRVIEVGQRFGRGLLHIPRRIRQGFERALL

SEQ ID NO: 299 - protein, 867 aa, HIV
MRARGIQMTWQNLWKWGTLILGLVIICSASNNLWVTVYYGVPVWRDAETTLFCASDAKAYSTEKHNVWATHACVPTDPNPQEINLGNVTENFNMWENNMVEQMHTDIISIWDQSLKPCVSLTPLCVTLNCNNITSDSSINSSTIQGREEIKNCSYNMTTGVGDRRQKVYSLFYRVDIEPIEGNSNSGNSSSSEYRLISCNTSVIKQACPKVTFEPIPIHYCAPAGFAILKCNDEEFNGTGPCRNVSSVQCTHGIKPVVSTQLLLNGSLAEGEIKIRAKNFSDNVGNIIVQLATPVRINCTRPNNNTRKSIRIGPGQAFYATGDIIGDIRQAHCNISRQKWNNTLQQVAAQLRKYLKDNTTIIFANPSGGDLEVTTHSFNCGGEFFYCNTSALFNSTWENDTVSTQGSNDTGSNDTITLPCRIKQFVNMWQRVGQAMYAPPIQGIIRCESNITGLLLSRDGGVGNNRTNETFRPGGGNMKDNWRSELYKYKVVKIEPLGVAPSRARRRVVAREKRAVVGLGAVFLGFLGAAGSTMGVASLTLTVQARQLLSGIVQQQNNLLMAIEAQQHLLKLTVWGIKQLQARILAIERYLKDQQLLGIWGCSGKLICTTNVPWNSSWSNKSQSEIWDNMTWLQWDKEVSNYTEMIYRLLEESQNQQEKNEQDLLALDQWASLWNWFSISKWLWYIKIFIMIVGGLIGLRIVFAVLSIVKSVRQGYSPLSFQTLTHPKREPDRPERIEEGGGEQDRDRSIRLVSGFLALAWDDLRSLCLFSYHRLRDFILIATRTVELLGHSSLKGLRLGWEGLKYLWNLLVYWGRELKISAITLLDSTAIAVAEWTDRIIETGQRIGRGILHIPRRIRQGFERALQ

SEQ ID NO: 300 - protein, 862 aa, HIV
  misc_feature (144)..(144): Xaa can be any naturally occurring amino acid
  misc_feature (159)..(159): Xaa can be any naturally occurring amino acid
  misc_feature (187)..(187): Xaa can be any naturally occurring amino acid
  misc_feature (329)..(329): Xaa can be any naturally occurring amino acid
  misc_feature (506)..(506): Xaa can be any naturally occurring amino acid
  misc_feature (699)..(699): Xaa can be any naturally occurring amino acid
  misc_feature (728)..(728): Xaa can be any naturally occurring amino acid
  misc_feature (749)..(749): Xaa can be any naturally occurring amino acid
  misc_feature (822)..(822): Xaa can be any naturally occurring amino acid
MKAKGTQRNWQSLWKWGTLILGLVIICSASNDLWVTVYYGVPVWKEATTTLFCASDAKAYDAEVHNVWATHACVPTDPNPQEVALENVTENFNMWENNMVDQMQEDIISLWDQSLKPCVELTPLCVTLNCTDFNTTSNNATNTXNSSLEMMEKGEIKNXSFNITTSLRDKRKKEYALFYNLDVVQMXNDNSSYRLTSCNTSVITQACPKVSFTPIPIHYCAPAGFVILKCNNKTFNGTGPCTNVSTVQCTHGIRPVVSTQLLLNGSLAEKEIVIRSKNFTDNAKTIIVQLKEPIEINCTRPNNNTRKRITMGPGRVWYTTGQIIGDIRXAHCNISKTKWNNTLGQIVRKLREQFMNKTIVFQRSSGGDPEIEMHSFNCGGEFFYCNTTQLFNSTWRSNSTWNDTTETNNTDLITLPCRIKQIVNMWQKVGKAIYAPPISGQIRCSSNITGLLLIRDGGGSNNTNETFRPGGGNMKDNWRSELYKYKVVKIEPLGVAPTRAKRRVVXREKRAVGIGALLFGFLGAAGSTMGAASMTLTVQARQLLSGIVQQQNNLLRAIEAQQHMLQLTVWGIKQLQARILAVERYLKDQQLLGIWGCSGKLICTTTVPWNASWSNKSLDDIWNNMTWMEWEREIDNYTGLIYTLIEQSQNQQERNEQELLEWDKWAGLWNWFSITNWLWYIKIFIMIIGGLIGLRIVFXVLSIINRVRKGYSPLSFQTLTHHQREPDXPGGIEEEGGEQDKDRSIRLVXGFLALAWDDLRSLCLFSYHRLRDFILIAARTVELLGRSSLKGLRLGWEGLKYLWNLLLYWGRELKNSAINLLXTVAIVVANWTDRAIEIVQRIGRAVLNIPVRIRQGFERALL

SEQ ID NO: 301 - protein, 854 aa, HIV
  misc_feature (8)..(8): Xaa can be any naturally occurring amino acid
  misc_feature (13)..(13): Xaa can be any naturally occurring amino acid
  misc_feature (168)..(168): Xaa can be any naturally occurring amino acid
  misc_feature (291)..(291): Xaa can be any naturally occurring amino acid
  misc_feature (644)..(644): Xaa can be any naturally occurring amino acid
  misc_feature (727)..(727): Xaa can be any naturally occurring amino acid
  misc_feature (752)..(752): Xaa can be any naturally occurring amino acid
MKAKGTQXNWQNXWKWGTLILGLVIICSASDNLWVTVYYGVPVWKEATTTLFCASDAKAYIAEAHNVWATHACVPTDPNPQEVVLGNVTENFNMWENNMVDQMQEDIISLWDQSLKPCVKLTPLCVTLNCTDVNTNTTDTNTTSILEMKGEIKNCSFNITTSLRDKMXKEYALFYSLDIVQMDNDNSSYRLTSCNTSVITQACPKVSFEPIPIHYCAPAGFVILKCNNKTFNGTGPCTNVSTVQCTHGIRPVVSTQLLLNGSLAEEDIVIRSKNFSDNAKTIIVQLKEPIXINCTRPNNNTRRSITMGPGKVLYTTGQIIGNIRSAHCNLSTERWNTTLRQIVGKLREQFGNKTIVFNHSSGGDPEIVMHSFNCGGEFFYCNTTKLFNSTWTVNGTTNTTNNNDTITLPCKIKQIINMWQEVGKAMYAPPISGQIRCSSNITGLLLVRDGGNSNETEIFRPGGGNMKDNWRSELYKYKVVKIEPLGVAPTRARRRVVQREKRAVGIGALLIGFLGAAGSTMGAASMTLTVQARQLLSGIVQQQNNLLRAIEAQQHMLQLTVWGIKQLQARILAVERYLKDQQLLGIWGCSGKLICTTNVPWNASWSNKSLNEIWNNMTWMEWEREIDNYTGLIYTLIEQSQNQXEKNEQELLELDKWTSLWSWFNITNWLWYIKIFIMIVGGLIGLRIVFAVLSIINRVRKGYSPLSFQTLTHHQREPDRPGGIEEXGGEQDNDRSVRLVSGFLALAWDDLXSLCLFSYHRLRDFILVAARTVELLGRSSLRGLRLGWEGLKYLWNLLLYWGRELKNSAINLLDTIAIAVANWTDRAIEVVHRVGRAFLNIPRRIRQGLERALL

SEQ ID NO: 302 - protein, 864 aa, HIV
MRVKETQMNWPNLWKWGTLILGLVIICSASNNLWVTVYYGVPVWKEATTTLFCASDAKAYDTETHNVWATHACVPTDPNPQEVVLENVTENFNMWKNDMVEQMHEDIISLWDQSLKPCVKLTPLCVTLNCTDLENANNTSRNDSKTSNTTSSPLEEREMKNCSFDITTTMNTKVKDYALFYKLDIVQIDENNNDTSYRLISCNTSVITQACPKVSFEPIPIHYCTPAGFAIIKCNNKRFNGTGPCTNVSTVQCTHGIRPVVSTQLLLNGSLAEEEVVIRSSNFTDNAKIIIVQLNVSVEINCTRPNNNTRKSIHLGQGRAWYTTGQIIGDIRQAYCNISSTKWNNTLRQVTEKLREQFGNKTIVFNHSSGGDPEIVMHSFNCGGEFFYCNTSQLFNSTWNGTSAWNYTTENDTIRLPCRIKQIINMWQEVGKAMYAPPIAGLIRCSSNITGLLLTRDGGNNTNTETFRPAGGDMRDNWRSELYKYKVVKIEPLGVAPTRAKRRVVQREKRAVGTIGAMFLGFLGAAGSTMGAASITLTVQARQLLSGIVQQQRNLLKAIEAQQHLLQLTVWGIKQLQARVLAVERYLKDQQLLGIWGCSGKLICTTAVPWNTSWSNRTHDDIWNNMTWMQWEREIDNYTKEIYTLIEESQNQQEKNELELLELDKWASLWNWFSISNWLWYIRIFIMIIGGLVGLRIVFAVLSIVNRVRQGYSPLSFQIPTHHQRREPDRPEGIEEGGGEQGRDRSVRLVSGFLALAWDDLQSLCLFSYHRLRDFILIAARTVELLGHSSLKGLRRGWEGLKYLGNLLLYWGQELKISAISLLDATAIAVAGWTDRIIEVAQRAWGAFLHIPRRIRQGLERALV

SEQ ID NO: 303 - protein, 854 aa, HIV
MRVKETQMNWPNLWKWGTLILGLVIICSAAENLWVTVYYGVPVWKDASTTLFCASDAKAYDTEAHNGWATHACVPTDPSPQEEILGNVTENFNMWENDMVEQMQEDIISLWDQSLKPCVKLTPLCVSLNCTDLRNDTNINRTIEGGEIKNCSFNITTSIRTKVKDYALFYSLDVEAIDNTSYRLRKCNTSIITQACPKVSFEPIPIHYCTPAGFAILKCNNKKFNGTGPCTNVSTVQCTHGIRPVVSTQLLLNGSLAEEEVIIRSSNFTNNAKIIIVQLNESVEINCTRPNNNTRKSIHIGPGRSWYTTGEIIGDIRQAHCNLSSTKWGNTLNQITEKLREQFGNKTIVFNQPSGGDPEIIVHSFNCGGEFFYCNTSQLFNSTWFQNGNSTWNDTAGNGTITLPCRIRQIVNMWQEVGRAMYAPPIKGQIRCSSNITGLLLTRDGGKNENTTNTTEIFRPAGGDMRDNWRSELYKYKIVKIEPLGVAPTKAKRRVVQREKRAVGTIGAMFLGFLGTAGSTMGAASITLTVQARQLLSGIVQQQRNLLRAIEAQQHLLQLTVWGIKQLQARVLAVERYLKDQQLLGIWGCSGKLICTTAVPWNASWSNKSLNEIWDNMTWMEWEREISNYTKEIYTLIEQSQNQQEKNEQELLALDKWASLWNWFDITNWLWYIKIFIMIVGGLIGLRIVFAVLSIVNRVRQGYSPLSLQTPIHQQREADRPEEIEEGGGEQGRNGSVRLVSGFLALAWDDLRSLCLFSYHRLKDLVSIATRTVELLGRSSLKGLRLGWEGLKYLGNLLLYWGQELKISAISLLDTTAIAVAGWTDRVIEVAQRAWRAILRIPRRIRQGFERALL

SEQ ID NO: 304 - protein, 870 aa, HIV
MRVKETQMTWPNWWKWGTLILGLVIICSASNNLWVTVYYGVPVWKDADTTLFCASDAKAYDTEVHNVWATHACVPTDPNPQEVVLGNVTENFNMWKNNMVEQMHEDIISLWDQSLKPCVKLTPLCVTLNCTDATWISDNNTSTNGSITINSTDEMKSCSFNMTTEVGDRKQNVSALFYKLDIVQMENNSSNSSSNYSEYRLIHCNTSVITQACPKISFEPIPIHYCTPAGFAILKCNNKTFSGTGPCTNVSTVQCTHGIRPVVSTQLLLNGSLAEKEVVIRSSNFTDNARVIIVQLNESVEINCTRPNNNTRKGIHMGPGHAWHTTRQIIGDIRRAHCTLKSTKWNNTLGQIVEKLREQFGNDKTIIFKQSSGGDPEIAMHSFNCGGEFFYCNTSKLFNSTWTNSTWDGTTENDNITLPCRIKQIVNMWQQVGRAMYAPPIAGPIKCSSNITGLILTRDGGNNGNDTNNKNETFRPGGGDMRDNWRSELYKYKVVKIEPLGVAPTQAKRRVVQREKRAVGAIGVMFLGFLGAAGSTMGAASITLTVQARQLLSGIVQQQRNLLRAIEAQQHMLQLTVWGIKQLQARVLAVERYLKDQQLLGLWGCSGKLICTTAVPWNASWSNRSLNEIWDNMTWMDWEREIANYTREIYTLIEESQNQQEKNELELLELDKWASLWNWFDITKWLWYIKIFIMIVGGLIGLRIIFAVLSIVNRVRQGYSPLSFQTPIHQQREPDRPEGIEEEGGEQGRDRSVRLVTGFFALAWDDLRSLCLFSYHRLRDFILIAARTVEILGHNSLKGLRRGWEVLKYLGNLLLYWGQELKISAISLFNATAITVAGWTDRVIEVAQRAWRAFLHIPRRIRQGLERALL

SEQ ID NO: 305 - protein, 864 aa, HIV
MRVMEIQKNCQHLWRWGILIFGMLMICKAADNLWVTVYYGVPVWKDAETTLFCAADAKGYNTEVHNVWATHACVPTDPNPQEIDLENVTENFNMWKNNMVEQMNEDIISLWDQSLKPCVKLTPLCVTLNCSNPSNNSSKNGEGEIKNCSYSMTTELKDKKQKVWSLFYKLDVVQINENNSTNSSSNNSSSNEQYRLINCNTSVITQACPKVTFEPIPIHYCAPAGFAILKCKDTQFNGTGPCKNVSSVQCTHGIMPVVSTQLLLNGSLAEGGKIMIKSENITDSAKNIIVQFTKPVQINCTRPNNNTRKSIRFGPGQAFYTNTIIGDIRQAHCNISKKQWNDTLKRVAEQLGKYFPNKNISFTNSSGGDLEITTHSFNCGGEFFYCNTSDLFNSTWTNDTWGENGTANDSKSNDTIMLPCRIKQIINMWQRVGQAMYAPPIAGIIKCTSNITGIILTRDGGENDSTETFRPGGGDMRDNWRSELYKYKVVKLEPLGVAPTKARRRVVERDKRAVGLGAFFLGFLGAAGSTMGAASLTLTVQARQLLSGIVQQQSNLLKAIEAQQHLLRLTVWGIKQLQARVLAVERYLQDQQLLGIWGCSGKLICTTSVPWNSSWSNKTQGEIWDNMTWLQWDKEISNYTGTIYRLLEEAQNQQEKNEQDVLALDKWASLWNWFSITNWLWYIKIFIMIVGGLIGLRIVMAIVSVVNRVRQGYSPLSFQIPSPNPEGPDRPGRIEEGDGEQDRDRSIRLVSGFLALAWDDLRSLCLFSYHRLRDCISIVARTVELLGHSSLKGLRLGWEGLKYLGNLLLYWGQELKNSAISLFDATAIAVAEGTDRVIVIVQRACRTILNIPRRIRQGLERALL

SEQ ID NO: 306 - protein, 862 aa, HIV
MRVRGIQRNYQHLWKWGILILGMLMISKATEDLWVTVYYGVPVWRDAETTLFCASDAKAYDTEAHNVWATHACVPTDPNPQEINLENVTENFNMWKNGMVEQMHEDIISLWDQSLKPCVKLTPLCVTLNCSRVKNTISSTQSPDSNNTMNCSFETTTELRDKKQKVQALFYELDIVQLNSSDSNDTLNRQYRLIHCDTSTITQACPKVSFEPIPIHYCAPAGFAILKCKDPEFNGTGPCKNVSSVQCTHGIRPVASTQLLLNGSLAEGNKTIIRSANITDNTKNIIVQFTKPVQINCTRPDVGQRRSVRIGPGRAFYTRQTYTRQAKGDIRQAQCNISSRQWNDTLQKVAEQLRKYFSNKTIIFTNSSGGDIEITTHSVNCGGEFFYCDTSGLFNSTWPANASRENEEKDRNVTLPCRIKQIVNMWQRVGRAMYAPPINGTIKCTSNITGMILTRDGNSGGNATNETFRPGGGDMRDNWRSELYKYKVVKLEPLGVAPTRARRRVVEREKRAAVGLFFLGFLGAAGSTMGAASVTLTVQARQLLSGIVQQQSNLLKAIEAQQHMLRLTVWGIKQLQARVLAVERYLQDQQLLGIWGCSGKLICTTFVPWNSSWSNRTQDDIWNNMTWLQWEREIDNYTGTIYRLLEESQNQQEKNEKDLLALDKWASLWNWFDISNWLWYIKIFIMIVGGLIGLRIVMAIISVVNRVRQGYSPVSFQIPPPTPEDPDRHGRIEDGGGEQGRDRSVRLVSGFLALVWEDLRSLCLFSYHRLRDCISIAARTVELLGHSSLKGLRLGWEGLKYLWNLLLYWGRELKNSAISLFNATAIAVAEWTDRVIEIVQRACRAIINIPRRIRQGLERALL

SEQ ID NO: 307 - protein, 840 aa, HIV
  misc_feature (256)..(256): Xaa can be any naturally occurring amino acid
  misc_feature (271)..(271): Xaa can be any naturally occurring amino acid
  misc_feature (800)..(800): Xaa can be any naturally occurring amino acid
MRVRGMQRNYQHLWKWGTMLFGMLMICNVAGNLWVTVYYGVPVWKEATTTLFCASDAKAYDTEVHNVWATHACVPTDPNPQEQFLKNVTENFDMWKNNMVEQMHTDVISLWDQSLKPCVKLTPLCVTLNCTNATDARVNSNTTTAATTTASSSLKEEPGAIQNCSFNMTTEVRDKQRTVNALFYRLDIVPINNSISNNSEYRLINCNTSTITQACPKVSWDPIPIHYCAPAGYAILKCNNETFNGTGPCKNVSVVXCTHGIKPVVSTQLLXNGSLVKEEIVIRSQNISDTAKIIIVHLNESVQINCTRPNNNTRKGIHLGPGQTFYATGEIIGDIRKAHCNVSGAQWNKTVEKVKEKLKSYFKNATIKFNTSSGGDPEITMHSFNCRGEFFYCNTSGLFNNSVFNNNTITLPCRIKQIVNMWQEVGRAMYAAPIAGNIACSSNITGLLLTRDGGCQNQSNTNCTETFRPWGGNMKDNWRSELYKYKVVEIEPLGIAPTKAKRRVVQRDKRAVGLGAMFLGFLGAAGSTMGAASITLTVQARQLLSGIVQQQNNLLRAIEAQQHMLQLTVWGIKQLQARVLALERYLKDQQFLGLWGCSGKLICTTTVPWNTSWSNRSLDYIWTNMTWMQWEKEISNYSEEIYRLIEESQNQQEKNEQELLALDKWASLWTWFDISKWLWYIKIFIMIVGGLIGLRIVFAVLSIVNRVRKGYSPLSFQTHFPSPREPDRPEGIEEGGGEQGRDRSVRLVNGFLALFWDDLRSLCLYSYHLLRDLLLSATRIVGHLGRWGWEVLKYWWNLLXTTAVVVAEGTDRVLEALQTAGRAILHIPRRIRQGLERSLL

SEQ ID NO: 308 - protein, 847 aa, HIV
  misc_feature (598)..(598): Xaa can be any naturally occurring amino acid
MRVRGMQRNYQHLWKWGTMLLGILMICNAAENLWVTVYYGVPVWKEATTTLFCASDAKAYDTEVHNVWATHACVPTDPDPQEIVLNVTENFNMWKNDMVEQMHTDIISLWDQSLKPCVKLTPLCVTLNCTNANSTRSSTPTEMLGPTEEPGAIKNCSFNMTTEVRDKHLKVNALFYRLDIVPISSGSNSSDNSSSGEYRLINCNTSTLTQACPKVSWDPIPIHYCAPAGYAILKCNNETFNGTGPCMNVSTVQCTHGIKPVVSTQLLLNGSLAEGDIIIRSQNISDNTKIIIVHLNESVQINCTRPNNNTRKSIHIAPGRAFYATGDIIGDIRKAHCNVSGEKWNQTLERVKAKLKPYFSNKTIQFNSSSGGDPEITMHSFNCRGEFFYCNTSGLFNDTVSNGTITLPCKIKQIVNMWQEVGRAMYAAPIAGKITCNSSITGLLLTRDGGSNTTGNTETFRPGGGDMRDNWRSELYKYKVVEIQPIGVAPTPAKRRVVQREKRAALTTMFLGFLGAAGSTMGAASIALTVQARQLLSGIVQQQSNLLRAIEAQQHMLQLTVWGIKQLQARVLAVERYLGDQQLMGLWGCSGKRICTTXVPWNTSWSNKSQADIWNNMTWMQWEKEISNYTGEIYRLIELSQNQQEKNEQELLELDKWASLWNWFSITNWLWYIKIFIIIVGGLIGLRIVFTVLSIVNRVRKGYSPLSFQTQSPSPREPDRPEGIEEGGGEQDRDRSVRFVNGFLALFWDDLRSLCLFSYHRLRDLLLIVARIVEFLGRRGWEILKYWWNLLQYWSQELKNSAISLLNTTAIVVAGGTDRVIEALQRVGRAILNIPRRIRQGLERALQ

SEQ ID NO: 309 - protein, 851 aa, HIV
  misc_feature (48)..(48): Xaa can be any naturally occurring amino acid
  misc_feature (150)..(150): Xaa can be any naturally occurring amino acid
  misc_feature (155)..(155): Xaa can be any naturally occurring amino acid
  misc_feature (187)..(187): Xaa can be any naturally occurring amino acid
  misc_feature (328)..(328): Xaa can be any naturally occurring amino acid
MRVRGMQRNYQHLWKWGIMLLGILMICNATKDLWVTVYYGVPVWREAXTTLFCASDAKGYETEVHNVWATHACVPTDPNPQEVVLENVTENFDMWKNNMVEQMHTDIISLWDQSLKPCVKLTPLCVTLNCTNANATKSASAKNVSTTASXANDSXTLEEPGAILNCSFNMTTEVRDKQLKVYSLFYXLDIVPISNNGSEYRLINCNTSTITQACPKVSWDPIPIHYCAPAGFAILKCNDKKFNGTGPCKDVSTVQCTHGIKPVVSLIVVNGSLAEEDIIIRSQNIFDNTKTIIVHLNESVQITCTRPNNNTRKSIRIGTGQAFYTTGXIIGDIRKAHCNVSGAQWNKTLEQVKAKLKSYWNTTIQFDSSSGGDLEITTHSFNCRGEFFYCNTSGLFNDTGTISNDTITLQCRIKQIVNMWQEVGRAMYAAPIAGNITCSSNITGLLLTRDGGGDGSDQTETFRPGGGNMKDNWRSELYKYKVVEIEPLGVAPTMAKRRVVQREKRAVGMAAMFLGFLGAAGSTMGAASITLTVQARQLLSGIVQQQSNLLRAIEAQQHLLQLTVWGIKQLQARVLAVERYLKDQQLLGIWGCSGKLICTTAVPWNASWSNNKTLEQIWDNMTWMEWEREISNYSREIYRLIEESQNQQEKNEQELLALDKWASLWNWFSISNWLWYIRIFIIIVGGLIGLRIVFAVLSIVNRVRKGYSPLSFQTHPPSPREPDRPEGIEEGGGEQGRDRSVRLVNGFLALFWDDLRSLCLFCYHQLRDLLLIVTRIVELLGRRGWETLKYWWNLLQYWSQELKNSAISLLNTTAIVVAEGTDRVIEALQRVGRAIFNIPRRIRQGLERILQ

SEQ ID NO: 310 - protein, 862 aa, HIV
MRVMETQRNCLGLWRWGTIILGMLLICSAAENLWVTVYYGVPVWRDADTTLFCASDAKSYSTEKHNVWATHACVPTDPNPQEITLENVTENFNMWKNNMVEQMHEDIISLWDESLKPCVKLTPLCVTLNCINITYNDTNKSTVDNSSEMENREEIKNCSFNTTTELRDRRKKEYALFYKLDIVQISENSSGNEYRLINCNVSTIKQACPKVTFEPIPIHYCAPAGFAILKCNNNTFSGTGPCTNVSTVQCTHGIKPVVSTQLLLNGSLATEKVMIRSENITDNTKNIIVQLKKPVVINCTRPNNNTRKSIRIGPGQAFYATGDIIGDIRKASCKINKTEWNDALSKVATQLGTHLNKSKINFKPSSGGDIEITTHTFNCGGEFFYCNTTNLFTWDSTTNGTNGNYTVSNNDTITLQCRIKQIINMWQRVGQAMYAPPIEGSITCVSNVTGLILTSDFVNKSTEEVTFRPGGGDMRDNWRSELYKYKVVKIEPLGVAPTKAKRRVVGREKRAVGLGAVFLGFLGAAGSTMGAASITLTVQARQLLSGIVQQQSNLLRAIEAQQHLLKLTVWGIKQLQARVLAVERYLKDQQLLGIWGCSGKLICPTAVPWNTSWSNKSFNEIWDNMTWLQWEKEISNYTEIIYNLIEESQNQQEKNEQDLLALDKWASLWSWFDISNWLWYIKIFIMIVGGLIGLRIVFAVLAILNRIRQGYSPLSFQTLTPNQRGPDRPEGIEEEGGEQGRGRSVRLVSGFLALAWDDVRSLCLFSYHRLRDLILVAARTVELLGHSSLKGLRLGWEALKHLWNYLLYWGQEIKSSAINLLDTIAIAVANWTDRVIEIVRRATRAIRNIPRRIRQGAERALQ

SEQ ID NO: 311 - protein, 856 aa, HIV
  misc_feature (399)..(399): Xaa can be any naturally occurring amino acid
  misc_feature (405)..(405): Xaa can be any naturally occurring amino acid
MRVVGTQRNYPHLWKWGTIILGLLLICSATDNLWVTVYYGVPVWRDANTTLFCASDAKSYSTERHNVWATHACVPTDPNPQEIALENVTENFNMWKNDMVEQMHEDIISLWDESLKPCVQLTPLCVTLNCTNVNCTCNNTTCDSNSTKWANEAMKNCSFNVTTELRDKKKQEYALFYKLDIVQMSRSDNSSDNGDYRLINCNVSTIKQACPKVTFDPIPIHYCAPAGFAILKCNTQTFNGTGPCTNVSTVQCTHGIKPVVSTQLLLNGSLAAEKVMIRSENITDNTKNIIVQLPRSVKINCTRPNNNTRKSIHIGPGQAFYATGEIIGDIRQAHCNISGTEWNDTLHKVVTQLGEHLNKSTIVFYPSSGGDIEITTPTFNCAGEFFYCYTTNLFNSTWXKNNEQXILLHSHAENTNYNNVAADRTSNVCPSQQQKYYMLIKYYRTDIDKWSWGSFADNVTFRPGGGDMRDNWGNELYKYKVVKIEPLGVAPTKAKRRVVGREKRAVGREAVFPGCLGAAGSTMGAASITLTVQARQLLSGIVQQQSNLLRAIEAQQHLLKLTVWGIKQLQARVLAVERYLKDQQLLGIWGCSGKLICPTAVPWNSSWSNKSYSDIWDNMTWLQWDKEINNYTSIIYNLIEESQNPQEKNEQDLLALDKWASLWNWFDISNWLWYIRIFIMIVGGLIGLKIVFAVLSIVKRVRQGYTPFSFQTLIPNQRGADRPEGTEEEGGEQGRGRSVRLVNGFLALAWDDLRSLCLFSYHRLRDLLLIVARTVELLGHSSLKGLRLGWEALKYLGNLLLYWGQELKSSAINLLDTVAIAVANWTDRVIEVLQRAGRAILNIPRRIRQGTERALL

SEQ ID NO: 312 - protein, 852 aa, HIV
  misc_feature (31)..(31): Xaa can be any naturally occurring amino acid
  misc_feature (138)..(138): Xaa can be any naturally occurring amino acid
  misc_feature (398)..(398): Xaa can be any naturally occurring amino acid
MRVRGIQRNYPPLWNWGTLILGLVITCSALXNNLWVTVYYGVPVWRDADTTLFCASDAKAYDTEVHNVWATHACVPTDPNPQEINLENVTEDFNMWKNNMVEQMHEDIISLWDQSLKPCVKLTPLCVTLNCTNIYTLXAQEIISNEEIRNCSFTMTTALRDKKQKIYSLFYKLDIVQIDNSSQYRLINRNTSTITQACPKVTFEPIPIHYCAPAGFAILKCKDKEFNGTGKCRNVSTVQCTHGINPVVSTQLLLNGSLAEEEIVISSENITNNAKIIIVQLKKPVQINCTRPNNNTRQGVHIGPGAVFYRTGDIIGDIRKAHCNVSGTEWNKTLHQVATQLRKHFGNKTIIFTNSSGGDVEITTHSFNCAGEFFYCNTTGLFNSRWDENSSIPNDTQXVNDTITLPCRIKQIINMWQRVGQAMYAPPIQGIIRCESNITGILLTRDGGKNNANNETFRPGGGDMRDNWRSELYKYKVVKIEPLGVAPTKAKRRVVEREKRAVGMGAVFLGFLGAAGSTMGAASITLTVQARQLLSGIVQQQSNLLRAIEAQQHMLKLTVWGIKQLQARVLALERYLKDQQLLGIWGCSGKLICTTNVPWNSSWSNKSYKDIWDNMTWLQWDKEISNYTNIIYELIEESQNQQEKNEQELLALDKWASLWSWFDISNWLWYIKIFIMIIGGLIGLRIIFAVLSIVNRVRQGYSPLSFQTLTHPQKEPDRHERIEEGGGEQDRSRSIRLVSGSLALIWEDLRSLCLFSYHRLRDCISIAARTVELLGHSSLKGLRLGWEGLKYLGNLLSYWVRELRLSAVNLLNTVAIVVAGGTDRVIEIIQRTCRAIIHIPRRIRQGLERLLL

SEQ ID NO: 313 - protein, 854 aa, HIV
  misc_feature (159)..(159): Xaa can be any naturally occurring amino acid
  misc_feature (397)..(397): Xaa can be any naturally occurring amino acid
  misc_feature (399)..(399): Xaa can be any naturally occurring amino acid
  misc_feature (401)..(401): Xaa can be any naturally occurring amino acid
MRGRGIRRNYPPLWNWGILILGLVIICSASKDLWVTVYYGVPVWRDADTTLFCASDAKAYDREVHNVWATHACVPTDPNPQELNLGNVTEDFNMWKNNMVEQMHEDIISLWDQSLKPCVKLTPLCVTLNCTHNITDIKHHPNGNISVAQEEIRNCSFNXTTELRDKTQKIYSLFYKLDIVQINNASQYRLINCNTSTITQACPKVTFEPIPIHYCAPAGFAILKCNDKEFNGTGECKNVSTVQCTHGIKPVVSTQLLLNGSLAEGKIAIRSENITNNAKTIIVQFNETVRINCTRPNNNTRTSVRIGPGQVFYGTGDIIGDIRQAHCNVSRTEWNKTLQQVATQLRSYFENKTIIFTNSSGGDVEITTPSFNCAGEFFYCNTTALFNSTWNSSTSGXEXKXTETTITLPCRIKQIVNMWQRVGQAMYAPPIKGGIRWGSNITGVLLTRDGGKNNNTNETFRPGGGDMRDNWRSELYKYKVVEIEPLGVAPTAKRRVVEREKRAVGLGAVFLGFLGAAGSTMGAASITLTVQARQLLSGIVQQQSNLLRAIEAQQHMLKLTVWGIKQLQARVLALERYLKDQQLLGIWGCSGKLICTTAVPWNSSWSNKSYDEIWDSMTWLQWDKEISNYTQVIYQLIEESQNQQDKNEQELLALDKWANLWNWFGITNWLWYIRIFIMIVGGLIGLRIVFAVLSIVNRVRQGYSPLSFQTLTHPQRGPDRHEGIEEGGGEQDRDRSIRLVAGFLALAWDDLRSLCLFSYRRLRDCILIAARIVELLGHSSLKGLRLGWESLKYLWNLLLYWGQELKLSAINLLDTTAIVVAGWTDRVIELVQRACRAILHIPRRIRQGLERLLL

SEQ ID NO: 314 - protein, 802 aa, HIV
  misc_feature (263)..(263): Xaa can be any naturally occurring amino acid
  misc_feature (567)..(567): Xaa can be any naturally occurring amino acid
MRVMGTRRSYPPLWNWGTLILGLVIMCSAFDNLWVTVYYGVPVWRDAETTLFCASDAKAYDTEVHNVWATHACVPTDPSPQEINLENVTEEFNMWKNNMVEQMHADIISLWDQSLKPCVKLTPLCVTLDCHMKNCSFNMTTELRDKKQQIYSLFYKLDIVPIGDKIINCNTSAITQACPKVTFEPIPIHYCAPAGFAILKCNDKEFNGTGKCRNVSTVQCTHGIKPVVSTQLLLNGSLAEGKVTIRSENITDNAKTIIVQFTXPVKINCTRPNNNTRTSVRIGPGQVFYATGIGDIRQAHCNVSKKEWKEALQEVAKQLTVLFNKTISFANSSGGDLEITTHSFNCGGEFFYCNTTDLFNSRRDYNSPVQNKTSCKYVAEVGQAMYAPPIPGVIQCKSNITGLLLTRDGGNNETFRPAGGGMRDNWRSELYKYKVVKIEPLGVAPTKAKRRVVEREKRAMGLGAVFLGFLGAAGSTMGAASITLTVQARQLLSGIVQQQSNLLKAIEAQQQLLRLTVWGIKQLQARVLALERYLKDQQLLGIWGCSGKLICTTTVPWNSSWSNTSYXDIWNNMTWLEWDKEINNYPQIIYNLIEESQNQQEKNEQELLALDKWGKLWNWFDITNWLWYIKIFIMIVGGLIGLRIVFAVLSIVNRVRQGYSPLSFQTLTRHRGPDRHERIEEGGGEQDKDRSIRLVNGFLALAWDDLRSLCLFSYHRLRDFISIAARTVELLGHSGWEGLKYLWNLLLYWGQELKTSAISLLNTTAIVVAGWTDRAIEIIQRAWRAVLHIPRRIRQGLERALL

SEQ ID NO: 315 - protein, 849 aa, HIV
MRVKGIQTNWQCLWTWGTLIIGLGIICSASNNLWVTVYYGVPVWEDANTPLFCASDAKAYSTESHNVWATHACVPTDPNPQEIPLENVTENFNMWKNNMVEQMNEDIISLWDESLKPCVKLTPLCVTLNCTNLSVNSTVTSSEDINICSFYITTEIKDRKKQEYALFYRLDVVPINDKNSNNSNNYSDYRLINCNVSAIKQACPKVSFDPIPIHYCAPAGFAILKCRDKEFNGTGPCKNVSTVQCTHGIKPVVSTQLLLNGSLAEKEIMIRSENLTDNAKVIIVQLNKSIEINCTRPNNNTRKSIGFGPGQAFYATGDITGDIRQAFCVVNKTKWNEMLQKVKAKLAESYNKNITNIKFSPPTGGDLEITTHSFNCRGEFFYCNTSGLFNSSNNNSGNITLPCRIKQIVRMWQRVGQAMYAPPIAGSITCISNITGLLITRDGGNNSTNRTEIFRPAGGDMRDNWRSELYKYKVVKIKPLGVAPTRAKRRVVQREKRAVGLGAVFLGFLGAAGSTMGAASITLTVQVRQLLSGIVQQQSNLLRAIEAQQHLLQLTVWGIKQLQARVLAVERYLKDQQLLGLWGCSGKLICTTNVPWNTSWSNKSYNEIWDNMTWIEWEREINNYTQQIYTLIEESQNQQEKNEQDLLALDKWASLWNWFNISNWLWYIKLFIMIVGGLIGLRIVFTVLSIINRVRQGYSPLSFQTHTHHQREPDRPEGIEGGGGEQDNDRSVRLVSGFLPLAWDDLRSLCLFSYHRLRDLLLIAARTVELLGRSSLKGLRLGWEGLKYLWNLLGYWGQELKNSAINLLDTVAIAVANWTDRIIEIVQRGFRAFLHIPRRIRQGFERALL

SEQ ID NO: 316 - protein, 855 aa, HIV
  misc_feature (48)..(48): Xaa can be any naturally occurring amino acid
MRVKGIQTNWQRLWTWGTLIIGLGIICSASKDLWVTVYYGVPVWEDAXTPLFCASDAKSYSTESHNVWATHACVPTDPNPQEIPLENVTENFNMWKNNMVEQMHEDIISLWDESLKPCVKLTPLCVTLHCTNLNCTARNCTEGVNSTVHNWEDIKNCSFNITTEIKDKKKQEYALFYRLDIVPINDKNNSNNSDYRLINCNVSAIKQACPKVTFEPIPIHYCAPAGFAILKCRDKEFNGTGPCKNVSTVQCTHGIKPVVSTQLLLNGSLAEKEIMIRSENLTNNAKVIIVQLNKSIEINCTRPNNNTRKSIRFGPGQAFYATGDIIGDIREAYCVVNRTEWNEMIQKVKEKLSESYNKNITNITFGPPTGGDLEITTHSFNCRGEFFYCNTSGLFNSSTNNNSAGNITLPCRIKQIVRMWQRVGQAMYAPPIAGTITCISNITGLILTRDGGNNSTNETFRPAGGDMRDNWRSELYKYKVVRIKPLGVAPTWARRRVVEREKRAVGLGAVFLGFLGAAGSTMGAASITLTVQVRQLLSGIVQQQSNLLRAIEAQQHLLQLTVWGIKQLQARVLAVERYLKDQQLLGLWGCSGKLICTTNVPWNTSWSNKSYNEIWENMTWIEWEREINNYTQQIYTLIEESQTQQEKNEQDLLALDKWASLWNWFDITRWLWYIKIFIMIVGGLIGLRIVFTVLSLINRVRQGYSPLSFQTHTHHQREPDRPEGIEEGGGEQDNGRSVRLVSGFLPLAWDDLRSLLLFSYHRLRDLLLIAARAVELLGHSSLKGLRLGWEGLKYLWNLLLYWGRELKNSAINLLDTVAIAVANWTDRIIEIVQRGFRAFLHIPRRIRQGAERALQ

SEQ ID NO: 317 - protein, 862 aa, HIV
MRVREMKRNCQNLWKWGIMLFGMLMICSATDNLWVTVYYGVPVWREANASLFCASDAKAYTKEAHNIWATHACVPTDPNPQEIELENVTENFNMWKNNMVEQMHEDIISLWDESLKPCVKLTPLCVTLNCAGSTTSSVNSTNSSVSTNSTSELEAAGMQNCSFNVTTVVRDKQKQEYALFYRPDIVPIDNNDNSSYRLINCNTSAITQACPKISFEPIPIHYCAPAGFAILKCRDKQFNGTGPCKNVSTVQCTHGIKPVVSTQLLLNGSLAEEEIIIRTENISRNEKSIIVQLNESVTINCTRPNNNTRRGIHIGPGQAIYATGKIIGNIRQAHCNISEADWNKTLKGVAIKLGDLFNTTKINFKPSSGGDPEITKHSFNCGGEFFYCDTTELFNSTWYRNGTLINGTKSINGTITLQCRIKQIINMWQEVGRAMYAPPIAGIINCTSNITGLILTRDGGNTSINGENDKNETFRPGGGDMRDNWRSELYKYKVVRIEPLGIAPTKARRRVVTREKRAIGLGAMFLGFLGAAGSTMGAASITLTVQARQLLSGIVQQQSNLLRAIEAQQHLLQLTVWGIKQLQARVLAVERYLKDQQLLGIWGCSGKHICPTNVPWNSSWSNKTLNNIWQNMTWMQWEKEIEKYTGTIYSLIEESQIQQENNEKELLELDKWASLWSWFDITKWLWYIRIFIMVVGGLIGLRIVFAVLSLVNRVRQGYSPLSFQTLLPAPRGPDRPEGIEEEGGERDRDRSIRLVNGFSALIWDDLRNLCLFSYHRLRDLILIVVRIVELLGRRGQEGLKYLWNLLQYWSRELKNSAISLLNATAIAVAEGTDRVLEILQRAGRAFLNIPRRIRQGFERALL

SEQ ID NO: 318 - protein, 852 aa, HIV
MRVREIERNCQNLWKWGIMLLGILMTCSAAGNLWVTVYYGVPVWKEANTTLFCASDAKAYSTEKHNIWATHACVPTDPNPQEMELGNVTENFNMWKNNMVEQMHEDIISLWDQSLKPCVKLTPLCVTLNCNDQVRNSEGSTQNINQTVDMKNCSFNITTVVRDKRKQVYALFYKLDIVPINNDDNTTSTYRLINCNTSAITQACPKVSFEPIPIHYCAPAGFAILKCRDKRFNGTGPCTNVSTVQCTHGIKPVVSTQLLLNGSLAEEEIIIRSENLTDNAKTIIVQLNESVVINCTRPGNNTRQGIHIGPGQALYTTKIIGDIRQAHCNISGAEWNKTLQRVAIKLRRLFNNKTITFNHSSGGDPEIVTHSFNCGGEFFYCNTTQLFNSTWNSTESSTWNSTESNNSTITLPCRIKQIINMWQEVGKAMYAPPIEGHINCSSNITGLLLTRDGGTNNTSNMEIFRPGGGNMKDNWRSELYKYKVVRIEPLGVAPTRAKRRVVDREKRAIGLGAMFLGFLGAAGSTMGAASVTLTVQARQLLSGIVQQQNNLLMAIEAQQHLLQLTVWGIKQLQARVLAVERYLKDQQLLGMWGCSGKHICTTDVPWNSSWSNKSLDDIWQNMTWMQWEREIDNYTGKIYSLLEESQIQQDKNEKELLELDQWASLWNWFNISQWLWYIRIFIMVVGGLIGLRIVFAVLSLVNRVRQGYSPLSFQTLLPAPRGPDRPEGIEEEGGERGRDRSIRLLNGLSAIIWDDLRNLCLFSYHRLRDLILIAGRIVELLGRRGEEGLKYLWNLLQYWGRELRNSANSLYNATAIAVAEGTDRVIEIVRRACRAILNIPRRIRQGFERALL

SEQ ID NO: 319 - protein, 848 aa, HIV
  misc_feature (281)..(281): Xaa can be any naturally occurring amino acid
  misc_feature (431)..(431): Xaa can be any naturally occurring amino acid
MRVRGTQMTWQNLWRWGTLILGLVIICSAQNLWVTVYYGVPVWREAETTLFCASDAKAYDPEVHNVWATHACVPTDPSPQEIELANVTENFNMWKNKMVEQMQEDIISLWDQSLKPCVKLTPLCVTLKCEDARFNITNSSVEELKTEVTNCSFNMTTELRDKRREVYSLFYRLDIVGINGNNSFRLINCNTSAITQACPKVTFEPIPIHYCAPAGFAILKCKEKEFNGTGPCNNVSSVQCTHGIKPVVSTQLLLNGSLAEKEIMIRSENFTNNAKIIIVQXVKPVTINCSRPGNNTRNSIRIGPGQVFYARGDIIGDIRKAYCEVNKTEWNETLHGVVKQLRKHWNKTIIFTNSSGGDLEITTHSFNCRGEFFYCNTSGLFNSTWHDNTTGLDNTNGTIILPCRIKQIINMWQRAGQAMYAPPIPGTITCXSNITGLLLTRDGGDKNSANETFRPGGGDMRDNWRSELYKYKVVKIEPLGIAPTRAKRRVVEREKRALGFGAVFLGFLGAAGSTMGAASITLTVQARQLLSGIVQQQSNLLRAIEAQQHMLKLTVWGIKQLQARVLAVERYLKDQQLLGIWGCSGKLICTTTVPWNSSWSNKSQEEIWNNMTWLQWDKEISNYTDIIYSLIEESQNQQEKNEQDLLALDKWSNLWTWFDISNWLWYIKIFIMIVGGLIGLRIVFAVLSIINRVRQGYSPLSFQTLTPNQEGLDRPGRIEEGGGEQDRNKSIRLVSGFLALAWDDLRSLCLFSYHRLRDFILIAARTVELLGHSSLKGLRLGWEGLKYLWNLLIYWGQELKNSAITLLDATAITVAGWTDRVIEITQRAWRAFLHIPTRIRQGLERALL

SEQ ID NO: 320 - protein, 855 aa, HIV
  misc_feature (86)..(86): Xaa can be any naturally occurring amino acid
  misc_feature (456)..(456): Xaa can be any naturally occurring amino acid
MRVKGIQKNWQRLWTWGTLIIGLGIICSASDNLWVTVYYGVPVWEDAYTPLFCASDAKAYSTESHNVWATHACVPTDPNPQEIPLXNVTENFNMWKNHMVEQMHEDIISLWDESLKPCVKLTPLCVTLNCTKVDCETRNCTTTNGTVNNSADIKNCSFNITTEIRDKSKKEYALFYKLDIMPIDDKNNGSNKNYSDYRLINCNVSTIKQACPKVSFDPIPIHYCAPAGFAILKCRDKEFNGTGPCRNVSTVQCTHGIKPVVSTQLLLNGSLAEKEIMIRSENLTNNAKVIIVQLNSSITINCTRPNNNTRKSITFGPGQAFYATGDIIGNIREAFCVVNRTAWNETMQKVKAKLAESYNTSTENITFGPPSGGDLEITTHSFICRGEFFYCNTSGLFNSSNNNSSNITLPCRIKQIVRMWQRVGQAMYAPPIAGSITCVSNITGLIITRDGGPNSXNETFRLAGGDMRDNWRSELYKYKVVKIKPLGVAPTKARRRVVERGKRAVGLGAVFLGFLGAAGSTMGAASITLTVQVRQLLSGIVQQQSNLLRAIEAQQHLLQLTVWGIKQLQARVLALERYLKDQQLLGLWGCSGKLICTTNVPWNASWSNKTLEEIWDNMTWIQWEREINNYTHQIYNLIEESQQQQEKNERDLLALDKWASLWNWFDISNWLWYIKIFIIIVGGLIGLRIVMAVLSIINRVRQGYSPLSFQTLTHHQREPDRPEGIEEGGGEQDRGRSIRLASGFLPIVWDDLRSLCLFSYHRLRDLLLIAARTLELLGRSSLKGLRLGWEGLKYLWNLLLYWGQELKNSAINLLDTVAIAVANGTDRIIEIVQRGFRAFLHIPRRIRQGFERALL

SEQ ID NO: 321 - protein, 854 aa, HIV
MRVKGIQKNWQCLWTWGTLIIGLVIICSASSSLWVTVYYGVPVWEDADTPLFCASDAKAYSTESHNVWATHACVPTDPNPQEIPLENVTENFNMWKNNMVEQMHEDIISLWDESLKPCVKLTPLCVTLTCTNATNNCTKGVNSTVDNCEDIKNCSFNVTTEIQDKKKQEHALFYRLDIVPINDQRNNSANYSDYRLINCNVSALKQACPKVSFDPIPIHYCAPAGFAILKCRDTEFNGTGPCKNVSTVQCTHGIKPVVSTQLLLNGSLAEKEIMIRSENLTNNAKVIIVQLNKSIEINCTRPNNNTRKSIRIGPGQAFYATGEIIGDIRKAYCEVNRTEWDEMILKVRAKLAESYNKNITSITFQPPTGGDLEITTHSFNCRGEFFYCNTSELFNSSSNNKGNITLLCKIKQIVRMWQRVGQAMYAPPIAGNITCRSNITGLIITRDGGTNSTNGTETFRPAGGDMRDNWRSELYKYKVVKIKPLGVAPTEARRRVVEREKRAVGIGAVLFGFLGAAGSTMGAASMALTVQARQLLSGIVQQQSNLLRAIEAQQHMLQLTVWGIKQLQARVLAVERYLEDQQLLGLWGCSGKLICTTNVPWNTSWSNKSYHEIWDNMTWVEWEREINNYTGHIYNLLEQSQNQQEKNEQDLLALDKWASLWSWFNITHWLWYIKIFIMIVGGLIGLRIVFTVLSIINRVRQGYSPLSFQTHTHHQREPDRPEGIEEEGGEQDNGRSGRLVIGFLPLAWDDLRSLCLFSYHRLRDLLLIAARTVELLGHSSLKGLRLGWEGLKYLGNLLLYWGQELKNSAINLLDTIAIATANWTDRIIEIVQGGFRAFLRIPRRIRQGLERALL

SEQ ID NO: 322 - protein, 864 aa, HIV
  misc_feature (620)..(620): Xaa can be any naturally occurring amino acid
MRVKGIQMNWQHLWTWGTLIIGLGIICSASNNLWVTVYYGVPVWKDADTPLFCASDAKSYSTESHNVWATHACVPTDPNPQEIPLENVTENFNMWKNNMVEQMHEDIISLWDESLKPCVKLTPLCVTLNCTTLNSNQTKNCTEESNSTVINCKEIKNCSFNITTELQDKKKQEYALFYKIDIVPINNSSSNNNYSDYRLINCNVSAIKQACPKVSFDPIPIHYCAPAGYAILKCRDEEFNGKGPCRNVSTVQCTHGIKPVVSTQLLLNGSLADKGIMIRSENLTNNAKVIIVQFNKSIDINCTRPGNNTRKSIRFGPGQAFYATGAIIGDIRQAYCEVNRTKWEEMIQQVKAELAESYNKSIANITFSPPTGGDLEITTHSFNCRGEFFYCNTSKLFNESLLNSSRNDSKNDTIILPCRIKQIVRMWQRVGQAMYAPPIEGSIRCESNITGLIITRDGGTNNKNTTEIFRPAGGDMRDNWRSELYKYKIVRIKPLGIAPTEARRRVVEREKRAVGLGAVFLGFLGTAGSTMGAASLTLTVQVRQLLSGIVQQQSNLLRAIEAQQHLLQLTVWGIKQLQARVLAVERFLKDQQLLGLWGCSGKLICTTNVPWNSSWSNKSXNEIWNNMTWIEWEREIDNYTQQIYTLLEESQTQQEKNEQDLLALDKWASLWTWFDITKWLWYIKIFIMIVGGLIGLRIVFTVLSIINRVRQGYSPLSFQTLTHRQREPDRPEEIEEGGGEQDKGRSIRLVSGFLPLAWDDLRSLCLFCYHRLRDLLLIAARAVELLGHSSLKGLRLGWEGLKYLWNLLLYWGRELKNSAINLLDTVAIAVANGTDRIIEIVQRVFRAFLHIPRRIRQGLERLLL

SEQ ID NO: 323 - protein, 862 aa, HIV
MRVRGIPMNWQLLWTWGTLIIGLGIICSASSNLWVTVYYGVPVWEDAYTPLFCASDAKAYVAESHNVWATHACVPTDPNPHEIPLQNVTENFNMWKNNMVEQMNEDIISLWDESLKPCVKLTPLCVTLNCTSVDCNTRNCTEGINRTTNYEDIKNCSFNATTEIKDRQKQEYALFYKLDVVQINDKDNSSNNNNYSDYRLINCNVSTIKQACPKVSFDPIPIHYCAPAGFAILKCRDAEFNGTGPCKNVSTVQCTHGIKPVVSTQLLLNGSLAEKEVMIRSENLTNNAKVIIVQFNKSIKINCTRPNNNTRRSVGIGPGQVFYATGDIIGDIRQAYCVVNRTEWNDMIQKVKVKLAESYNKTTENITFSTPTGGDLEITTHSFNCRGEFFYCNTSGLFNSSNNNSSEKGNITLPCRIKQIVRMWQRVGQAMYAPPIAGRINCVSNITGLIITRDGGNRNTTNNTEVFRPAGGDMRDNWRSELYKYKVVKIKPLGVAPTKARRRVVGREKRAVGLGAVFLGFLGAAGSTMGAASITLTVQVRQLLSGIVQQQGNLLRAIEAQQHLLQLTVWGIKQLQARVLAVERYLKDQQLLGLWGCSGKLICTTNVPWNSSWSNKSFNEIWDNMTWIEWEREINNYTTHIYTLIEESQNQQEKNEQDLLALDKWASLWTWFDISNWLWYIRIFIMIVGGLIGLRIVFAVLSIINRVRQGYSPLSFQTHTHHQREPDRPEGIEEEGGEQDRARSVRLVSGFLPLAWDDLRSLCLFSYHRLRDLLLIVARAVELLGHSILKGLRLGWESLKYLWNLLLYWGRELKNSAINLFDTVAIAVANGTDRIIEIVQRGFRAFLHIPRRIRQGFERALL

SEQ ID NO: 324 - protein, 866 aa, HIV
  misc_feature (137)..(137): Xaa can be any naturally occurring amino acid
  misc_feature (331)..(331): Xaa can be any naturally occurring amino acid
  misc_feature (397)..(397): Xaa can be any naturally occurring amino acid
  misc_feature (404)..(404): Xaa can be any naturally occurring amino acid
  misc_feature (459)..(460): Xaa can be any naturally occurring amino acid
  misc_feature (468)..(468): Xaa can be any naturally occurring amino acid
  misc_feature (560)..(560): Xaa can be any naturally occurring amino acid
  misc_feature (591)..(591): Xaa can be any naturally occurring amino acid
  misc_feature (602)..(602): Xaa can be any naturally occurring amino acid
  misc_feature (627)..(627): Xaa can be any naturally occurring amino acid
  misc_feature (633)..(633): Xaa can be any naturally occurring amino acid
  misc_feature (637)..(637): Xaa can be any naturally occurring amino acid
  misc_feature (658)..(658): Xaa can be any naturally occurring amino acid
  misc_feature (662)..(662): Xaa can be any naturally occurring amino acid
  misc_feature (851)..(851): Xaa can be any naturally occurring amino acid
  misc_feature (854)..(854): Xaa can be any naturally occurring amino acid
MRVMEIQRSYPNFWKWGTLIIGLVMICSASDNLWVTVYYGVPVWKEAETTLFCASDAKAYSTESHNVWATHACVPTDPNPQEIGLENVTENFNMWKNNMVEQMHEDIISLWDESLKPCVKLTPMCVTLNCTNVNETXNNNTTPSSPVNKEEIKNCSFSATTEIKNRKREEYALFYRLDIKPYGDSYILINCNASAIKQACPKVTFEPIPIHYCAPAGFAILKCRDKNFNGTGTCNNVSTVQCTHGIKPVVSTQLLLNGSLSEEEIVIRSENISDNAKTIIVQLNSSVEINCTRPNNNTRKSLHLGPGQTFYATGAIIGDIRQAHCNVSEDXWTKTLQEVVTQLGKSFKNATTIHFNQSSGGDIEITTHSFVCAGEFFYCNTTGLFNSSWTRNNITDXWKRNNTXNNTAPNGTITLPCRIKQIINMWQRVGRAMYNPPIPGVIKCVSNITGLLLTRDGGXXNNGTENEXEIFRPEGGNMRDNWRSELYKYKVVKIEPLGIAPTRARRRVVERGKRAVGLGAVFLGFLGTAGSTMGAASITLTVQVRQLLSGIVQQQSNLLXAIEAQQHLLQLTVWGIKQLKARLLAVERYLXDQQLLGIWGCXGKLICTTNVPWNTSWSNKSYEEIWXNMTWIXWERXIDNYTLQIYSLIEESQNQQEXNEQXLLSLDKWASLWNWFDISNWLWYIRIFIIIVGSLIGLRIVFAVLSIVNRVRQGYSPLSFQTLTHHQQEPDRPGRIEEEDGEQDRDRSVRLVSGFLPLAWDDLRSLCLFSYHRLRDLILIVARTVELLGRSSLKGLRLGWEGLKYLGNLLLYWGRELRNSAINLLDTLAIATANWTDRVIEVVQRAGRAIXNIXTRIRQGLERALL

SEQ ID NO: 325 - protein, 860 aa, HIV
  misc_feature (26)..(26): Xaa can be any naturally occurring amino acid
  misc_feature (29)..(29): Xaa can be any naturally occurring amino acid
  misc_feature (67)..(67): Xaa can be any naturally occurring amino acid
  misc_feature (113)..(113): Xaa can be any naturally occurring amino acid
  misc_feature (132)..(132): Xaa can be any naturally occurring amino acid
  misc_feature (150)..(150): Xaa can be any naturally occurring amino acid
  misc_feature (156)..(156): Xaa can be any naturally occurring amino acid
  misc_feature (195)..(195): Xaa can be any naturally occurring amino acid
  misc_feature (205)..(205): Xaa can be any naturally occurring amino acid
  misc_feature (243)..(243): Xaa can be any naturally occurring amino acid
  misc_feature (293)..(293): Xaa can be any naturally occurring amino acid
  misc_feature (559)..(559): Xaa can be any naturally occurring amino acid
  misc_feature (650)..(650): Xaa can be any naturally occurring amino acid
  misc_feature (676)..(676): Xaa can be any naturally occurring amino acid
MRVREMKRNYPDLWKGGILILGLVIXCSXSDKLWVTVYYGVPVWKDAETPLFCASDAKAYSTEKHNXWATHACVPTDPNPQEIGMENVTENFNMWKNNMVEQMHEDIISLWDXSLKPCVKLTPLCVTLNCTXVNITGVTNNTSTEEANNXTKGMAXEMRNCSFNVTSVLRDKKKTEYALFYRLDVVPIDNSDNSXYRLINCNTSXIKQACPKVTFEPIPIHYCAPAGYAILKCRDKKFNGTGXCKNVSTVQCTHGIRPVVSTQLLLNGSLAEEEIIIRSENITDNAKNIIVHXNESVGINCIRPNNNTRKSVRIGPGQTFYATGDIIGDIRSAHCNVSGTQWNKTLKAVANKLREYFKNKTITFKSSSGGDLEITTHSFNCGGEFFYCNTSLLFNSSWKGNDSIQESEEPITLPCRIKQIVNLWQEVGRAIYAPPIPGIINCTSNITGLILTRDGGKDDNSSETFRPGGGDMRDNWRSELYKYKVVKIEPLGIAPTKARRRVVEREKRAVGLGAVFLGFLGAAGSTMGAASITLTVQVRQLLSGIVQQQNNLLRAIEAXQHLLQLTVWGIKQLQARVLAVEKYLKDQQLLGIWGCSGKLICTTNVPWNSNWSNKSYNEIWDNMTWLEWEREIDNYTQQIYSLIEESQNQXEKNEQDLLALDKWASLWNWFDITKWXWYIKIFIMIVGGLIGLRIVFAVLSIVKRVRQGYSPLSFQTLTPHQREPDRPGRIEEEGGEQDRGRSVRLVSGFLPLFWEDLRNLCIFSYHRLRDFILIAARTVELLGRSSLKGLRLGWEGLKYLWNLLLYWGRELKNGAINLFDTTAIAVANWTDRGIEVVQRIGRAIYNIPRRIRQGAERALI

SEQ ID NO: 326 - protein, 866 aa, HIV
  misc_feature (518)..(518): Xaa can be any naturally occurring amino acid
  misc_feature (525)..(525): Xaa can be any naturally occurring amino acid
  misc_feature (529)..(529): Xaa can be any naturally occurring amino acid
  misc_feature (622)..(622): Xaa can be any naturally occurring amino acid
  misc_feature (648)..(648): Xaa can be any naturally occurring amino acid
MRVREIQRNYPHFWRWGILILGLGIICSASDKLWVTVYYGVPVWKDAETILFCASDAKAYGTERHNVWATHACVPTDPNPQEIKLENVTEEFNMWKNNMVEQMHEDIISLWDESLKPCVKLTPLCITLQCTNITINMTGNSNSNTTNNSTVDSVEDMKNCSFNTTTELRDKKRGEYAFFYKLDIVPLKGSDNSNDIRYRLINCNTSAIKQACPKVSFEPIPIHYCAPAGYAILKCRDKMFNGTGLCKNVSTVQCTHGIKPVVSTQMLLNGSLAEEEIVIRSENITDNAKNIIVQFNKAVVINCTRPANNTRKSVRIGPGQTFYATGDVIGDIRQAHCNISRAQWNKTLQEVAKKLRNYFNKTINFTQSSGGDLELTTHSFNCGGEFFYCNTSHLFNSSWEGNGIASTQESQESNDNITLQCRIKQIIRLWQRVGQAMYAPPIQGVIRCSSNITGLILTRDGGNTSNDAEIFRPGGGDMRDNWRSELYKHKVVKIEPLGIAPTKARRRVVEREKRAVGXGAVFLGXLGAXGSTMGAASITLTVQVRQLLSGIVQQQSNLLRAIEAQQHLLQLTVWGIKQLQARVLAVERYLKDQQLLGIWGCTGKLICTTNVPWNSSWSNKSXNEIWDNMTWIQWEREIDNYTQQIYSXIEESQNQQEKNEQDLLALDKWASLWNWFSISKWLWYIQIFIMIVGGLIGLRIVFAVFSIVKRVRQGYSPLSFQTLTHHQREPDRPGEIEEGGGEQGRDRSIRLVSGFLPLFWEDLRNLCLFCYHRLRDFILIAARTVELLGHSSLKGLRLGWEGLKYLWNLLLYWGQELKNSAINLFDTTAIAVANWTDWGIEVVQRIGRAICNIPRRIRQGLERLLL

SEQ ID NO: 327 - protein, 852 aa, HIV
MRVKGTQRNWQGLWRWGLMILGMAMICSAKEDLWVTVYYGVPVWRDADTTLFCASDAKAHTTEVHNVWATHACVPTDPNPQEIILENVTENFNMWKNNMVEQMHEDIISLWDESLKPCVKLTPLCVTLNCTNANATNNHTTINDNMKGELKNCSFNVTTAIKDKQQKVHALFYKLDVVQIGNDTNTTGAEYRLINCNTSVIKQACPKVTFEPIPIHYCAPAGFAILKCNNKTFNGTGPCTNVSSVQCTHGIKPVVSTQLLLNGSLSEEEVIVRFENLTNNAKTIIVHLNKSVIINCTRPSNNTRTSVSIGPGQVLFYRAGDIIGDIRQAHCNINETQWEDTLYKVAAQLRKHLNKSSSIFKPSSGGDIEVTTHTFNCMGEFFYCNTTTLFNSTWNDTTKGSNETNSTITLPCRIKQIVNMWQRTGRAMYAPPISGVINCASNITGLLLTRDGGNNNDTNGTETLRPGGGNMRDNWRSELYKYKVVQIEPLGIAPTKAKRRVVDREKRAVGIGAMIFGFLGAAGSTMGAASITLTVQARQLLSGIVQQQSNLLRAIEAQQHMLQLTVWGIKQLQARVLAVERYLKDQQFLGIWGCSGKIICTTAVPWNSSWSNKSYEEIWNNLTWIEWDKEISNYTSQIYELLVKSQDQQEKNEKDLLALDKWASLWNWFDISNWLWYIKIFIMIVGGLIGLRIVCAVCSIINRVRQGYSPVSFQIHTPNPEGLNRPGRIGEEGGEQGRDRSTRLANGFLALVWDDLRNLCLFSYHRLRDFVLILGHSSLKGLKLGWEGLKHLWNILLYWGRELKNSAINLLDTIAIAVANWTDRVIEVVQRAGRAILNIPRRIRQGFEIALL

SEQ ID NO: 328 - protein, 863 aa, HIV
MKVMGIQRNWQGLWRWGLMILGMIMICSVQGNLWVTVYYGVSVWREADTTLFCASDAKAHETEAHNVWATHACVPTDPNPQEILLDNVTENFNMWRNNMAEQMHEDIISLWDESLKPCVRLTPFCVTLNCTDVNTTRIHDSTNTSIHTTEELKNCSFNVTTAIKDKKQKLQALFESLDVVPMNKSSNTYRLINCNTSVIKQACPKTSFEPIPIHFCAPAGFAILKCNNKKFNGTGPCTNVSSVQCTHGIRPVVSTHLLLNGSLAEEEIIIKSENLTDNTKTIIVHLNESVKINCTRPFNNTRKSVSLGPGSVWYRPGEVIGDIRQAYCNINRKEWNGTLYKVVAQLGRHLNNMSTINFQPPPSGGDIEITTHTFNCGGEFFYCDTKELFNSTWNKSTNGTWTKNSTTGETGNTANITLQCRIKQIVNMWQRTGQAIYAPPIRGIIQCESNITGILLTRDRHNHTNETFRPGGGNMKDNWRNELYKYKVVEIEPLGIAPTRAKRRVVEREKRAVGIGALIFGFLGAAGSTMGAASITLTVHARQLLSGIVQQQSNLLRAIEAQQHMLQLTVWGIKQLQARVLAVERYLKDQQFLGIWGCSGKIICTTAVPWNSSWSNKSYEAIWNKMTWIEWDREISNYTKQIYELLTESQDQQEKNEKDLLALDKWASLWNWFDISNWLWYIKIFIMIVGGLIGLRIVFTVFSIINRVRQGYSPLSFQIHTPNPEGLDRLGRIEEEGGEQGKSRSIRLVSGFLALAWDDLRNLCLFLYHRLKDCALIAARTVELLGHSSLKGLRLGWEGLKYLWNLLQYWGQELKNSAINLLDTVAIATANWTDRVIEVAQRAGRAIINIPRRIRQGAERALQ

SEQ ID NO: 329 - protein, 856 aa, HIV
MRVKETRKNYWQLWRWGMMLLGMLMICSAKEQLWVTVYYGVPVWKEATTTLFCASDAKAGNTEAHNVWATHACVPTDPNPQEVVLENVTENFNMWKNNMVEQMHEDIISLWDQSLKPCVKLTPLCVTLNCTVLNIRDMNSTANGTLVGMETEMTNCSFNVTSSIGDKRHKEYALFHKLDVVSINENSSSYTLINCNTSVITQACPKVSFEPIPIHYCTPAGFAILKCNDKKFNGTGPCTNVSTVQCTHGIKPVVSTQLLLNGSLAEEEIIIRSENFTNNAKIIIVQLNRTVDINCTRPGNNTRKSIHIAPGRAFYATGDIIGDIRQAHCNLSSTEWRDTLKQVAIKLREQFENKTIAFNKSSGGDPEIVMHNFNCGGEFLYCNTTQLFNGTWNGNDTWNDTWNSTNGIITLPCRIRQIINRWQEVGKAMYAPPIKGQLNCSSKITGLLLTRDGGGNVNGTENDTETFRPGGGDMRDNWRSELYKYKVVRIEPLGVAPTKAKRRVVQREKRAVGTMGAMFLGFLGAAGSTMGAASVTLTVQARLLLSGIVQQQNNLLRAIEAQQHLLQLTVWGIKQLQARVLAVERYLRDQQLLGIWGCSGKLICTTAVPWNASWSNKNLTQIWDNMTWMQWEKEIDNYTGLIYSLLEESQNQQEKNEQELLQLDQWASLWNWFDISNWLWYIRIFIMIVGGLVGLRIVFAVLSIVNRVRQGYSPLSLQTLLPTQRGPDRPEGIEGEGGERDKGRSIRLVDGFLAIIWDDLRSLCLFCYHRLRDLLLIVKRVLELLGHRGWEALKYWWNLLQYWSQELKNSAVSLLNTTAIAVAEGTDRVIEVLQRICRAILNIPRRIRQGFERALL

SEQ ID NO: 330 - protein, 868 aa, HIV
MRVRGMQRNWKHLGTWGLLFLGILIICNATNQSWVTVYYGVPVWKEATTTLFCASDANAVKTEAHNIWATHACVPTDPIPQEVVLKNVTENFNMWKNNMVEQMHEDIISLWDESIKPCVKLTPLCVTLNCTNNVTVTNMNATNTTGNSSVEAMEGEMKNCSFNVTTSIGDKMQKEYALFYKLDVVPIANDNASYTLINCNTSVITQACPKVSFEPIPIHYCAPAGFALLKCNNKTFNGTGPCTNVSTVQCTHGIRPVVSTQLLLNGSLAEEEIIIRSENLTDNAKIIIVQLNETVEINCTRPNNNRNKRIHLGRGRIMYVTERIQGGIRQAHCNISREKWENTLRQVVTKLEEQFTKLGEQFKDFKNRTIAFNQSSGGDPEIVMHTFNCGGEFFYCNTTLLFNSTWKWNNTWNNTGKGADKNITLLCRIKQIINRWQEVGKAMYAPPIEGQIRCSSNITGLLLTRDGGSNNETNMTETFRPAGGDMRDNWRSELYKYKVVKIEPLGVAPTMARRRVVQREKRAVGALGALFLGFLGAAGSTMGAASMTLTVQARQLMSGIVQQQNNLLRAIEAQQHLLQLTVWGIKQLQARILAVERYLKDQQLLGIWGCSGKLICTTNVPWNSSWSNKSLEQIWDNMTWMQWEKEIDNYTDMIYTLIEKAQNQQEKNEQDLLQLDTWASLWNWFDITNWLWYIKIFIMIVGGLVGLRIVCAVLSIVNRVRQGYSPLSFQTRLPVQREPDRPGGIEEEGGERDNDRSIRLADGFLAIIWEDLRSLCLFSYHRLRDLLLIVTRIVELLGRRGWEALKYWWNLLQYWGQELKNSAVSLLNATAIAVAEGTDRVIEILQRICRAIRNIPTRIRQGLERALL

SEQ ID NO: 331 - protein, 858 aa, HIV
MRAKGTRKNYWWKWGMMLLGMLMICNAAEQSWVTVYYGVPVWKEASTTLFCASDASAVDTEVHNVWATHACVPTDPNPQEIVLENVTENFNMWKNNMVDQMHEDIISLWDQSLKPCVKLTPLCVTLNCTNWNTTNKLNATDTNSSRIEEEMKEEMKNCSFNVTSSIGNKMQKEYALFYKLDVVPINNDSTSYTLINCNTSVITQACPKVSFEPIPIHYCTPAGFALLKCNDKKFNGTGPCTNVSTVQCTHGIKPVVSTQLLLNGSLAEEEIVIRSENFSNNAKTIIVQLNETVEITCERPNNNTRKGIHLGFGRALYATGEIIGDIRQAYCNLNRTKWENTLKRIVTKLGEQFKNQNKTITFDLSSGGDPEIMLHSFSCGGEFFYCNTTQLYNSNRKQENNGTWNNNGSNTNDNITLPCRIKQIINRWQEVGKAMYAPPITGAIRCLSNITGLLLTRDGGTRANLSETFRPGGGDMRDNWRSELYKYKVVKIEPLGVAPTKAKRRVVQREKRAVGTIGAMFLGFLGAAGSTMGAASMTLTVQARQLLSGIVQQQNNLLRAIEAQQHLLQLTVWGIKQLQARVLAVERYLKDQQLLGIWGCSGKLICTTAVPWNTSWSNKSLDEIWNNMTWMQWEKEIDNYTGVIYNLIEEAQNQQEKNEQELLQLDTWASLWNWFNITKWLWYIKIFIMIVGGLVGLRIVFAVLSIVNRVRQGYSPLSFQTRLPAQRGPDRPGGIEEEGGERDKDRSIRLVDGFLAIIWEDLRSLCLFSYHRLRDLLLIVTRVVELLGRRGWEALKYCWNLLQYWSQELRNSAVSLLNATAIAVAEGTDRIIEIVQIICRAILHIPRRIRQGLERALQ

SEQ ID NO: 332 - protein, 870 aa, HIV
MRAKETMKTYWHSWGMMLLGMLMICSATEQLWVTVYYGVPVWKEASTTLFCASDAKAVDTEAHNVWATHACVPTDPNPQELVLENVTENFNMWKNDMVEQMHEDIISLWDESLKPCVKLTPLCVTLKCINLNATNLNDASTQAPTTKSNSSWINEEGEMKNCSFNVTTSRKDKMKKEYALFHTLDIVSTGEGDNTSYILITCNTSVITQACPKISFEPIPIHYCTPAGFALLKCNDKKFNGTGTCKNVSTVQCTHGIRPVVSTQLLLNGSLAEEDIVIKSENFTDNAKTIIVQLNETIEINCTRPNNNTRKSIHIGPGRAFYAAGEVIGKIRQAHCSLSESKWKRTLEQIATKLGEQFKINETIAFDQPPPGGDPEIVMHSFNCGGEFFYCNTSRLFNSVWRLDNNTSWEQDNNTRNGTNSNNDTITLPCRIKQIINMWLAVGKATSPPPIRGQIRCSSTITLLLSTNDGGSNNTTNRNETFRPGGGDMRDNWRSELYKYKVVRIEPLGVAPTKAKRRVVQREKRAVGIGAMFLGFLGAAGSTMGAASVALTVQARQLLSGIVQQQNNLLRAIEAQQHLLQLTVWGIKQLQARVLAVESYLRDQQLLGIWGCSGKLICTTAVPWNASWSNKSQSEIWDNMTWMEWEREIGNHTRFIYSLLEESQHQQEKNEQELLQLDKWANLWSWFDITKWLWYIRLFIMIVGGLVGLRIVFAVLSIVNRVRQGYSPLSFQTRLPVPRGPDRPEGIEEDGGERGRDRSIRLVDGFLAIIWDDLRSLCLFSYHRLRDLLLIVARIVELLGRRGWEALKYWWNLLQYWSLELKNSAVSLLNATAIAVAEGTDRVIEVVQRIWRAILHIPTRIRQGLERALL

SEQ ID NO: 333 - protein, 855 aa, HIV
MRVKGIRKNWQGLWKWGTMLLGMLMICNAEEQLWVTVYYGVPVWKEAQTTLFCASDAKAVDTEAHNVWATHACVPTDPSPQEIVLENVTENFNMWKNNMVEQMHEDIISLWDQSLKPCVRLTPLCVTLNCTNLDNTTNSTTNSSSNGMKGDMKNCTFNVTTIRRDKIEKQYALFDKLDIVPVENDTESYTLINCNTSVITQACPKISFEPIPIHYCTPAGFALLKCNDKQFNGTGPCKNVSSVQCTHGIRPVVSTQLLLNGSLAEEDIVIRSENFTNNAKTIIVQLNETVRINCTRPNNNTRRSMHLGPGRALFHATDIIGDIRQAHCNLSGEDWENTLKQIVTKLGEQFGNITKITFNRSSGGDPEIVMHSFNCGGEFFYCSTTKLFNSTWERNGTTTWKNINGSGTNETITLPCRIKQIINMWQQVGKAMYAPPISGKINCSSNITGLLLTRDGGRNNTGTVETFRPGGGDMRDNWRSELYKYKVVQIEPLGIAPTKAKRRVVQREKRALGIGAMFLGFLGAAGSTMGAASVALTVQARQLLSGIVQQQNNLLRAIEAQQHLLQLTVWGIKQLQARVLAVEKYLKDQQLLGIWGCSGKLICTTTVPWNTSWSNKSQDEIWNNMTWMQWEKEIDNYTGLIYTLIEGAQYQQEKNEQELLQLDKWASLWSWFDITKWLWYIRIFIIIVGGLIGLRIVFAVFSIVNRVRQGYSPLSFQTHHPAPRGPDRPEGIEEEGGGRDKDRSIRLVDGFLAIIWDDLRSLCLFIYHRLRDLLLIVIRTVEILGHRGWEILKYWWNLLQYWSQELKNSAVSLLNATAIAVAEGTDRVIEVIQRTCRAILHIPTRIRQGLERALL

SEQ ID NO: 334 - protein, 871 aa, HIV
  misc_feature (111)..(111): Xaa can be any naturally occurring amino acid
  misc_feature (410)..(410): Xaa can be any naturally occurring amino acid
  misc_feature (412)..(412): Xaa can be any naturally occurring amino acid
  misc_feature (416)..(416): Xaa can be any naturally occurring amino acid
  misc_feature (423)..(423): Xaa can be any naturally occurring amino acid
  misc_feature (736)..(736): Xaa can be any naturally occurring amino acid
  misc_feature (849)..(849): Xaa can be any naturally occurring amino acid
  misc_feature (860)..(860): Xaa can be any naturally occurring amino acid
  misc_feature (862)..(862): Xaa can be any naturally occurring amino acid
  misc_feature (869)..(869): Xaa can be any naturally occurring amino acid
MRVKGIQRNWQQWWIWGILGFWMLMIYNVRGNLWVTVYYGVPVWREAKTTLFCASDAKAYDTEVHNVWATHACVPTDPSPQELDLGNVTENFNMWENDMVDQMHQDIISLXDQSLKPCVKLTPLCVTLNCSDAISNANKTNANQTNANQTSNNSSTIDMKGEIKNCSFNMTTELRDKIRKVHALFYRLDIVPLNENNSSSGDYRLINCNTSAITQACPKVSFDPIPIHYCAPAGYAILKCKNKNFNRTGPCNNVSTVQCTHGIKPVISTQLLLNGSLAEDEIIIRSKNITDNVQTIIVQLKEPVEINCTRPNNNTRESIRIGPGQTFYATGDIIGDIRQAYCNISRAAWEKTLLEVSKKLSEHFPNKTINFTKHSGGDLEITTHSFNCKGEFFYCNTSRLFNRAYFNSTXHXNSTXNSTGTEXSTIMVIPCGIKQIINMWQEVGRAMYAPPVKGIITCRSNITGLLLTRDRGVNVTNSTETFRPGGGDMKDNWRSELYKYKVVEVKPLGIAPTKAKRRVVEREKRAALGAMFLGFLGAAGSTMGAASITLTVQARQLLSGIVQQQSNLLRAIEAQQHMLQLTVWGIKQLQTRVLAIERYLKDQQLLGIWGCSGKIICTTAVPWNSSWSNKSQEDIWENMTWMQWDREINNYTDTIYRLLEVSQNQQEKNEQDLLALDQWQNLWNWFGITKWLWYIKIFIMIVGGLIGLRIIFAVLSIVNRVRQGYSPLSFQTLTPXPRGPDRLGGIEEEGGEEDKDRSIRLVSGFLALAWDDLRSLCLFSYHRLRDLILIAARAVELLGRRGWEILKYLKSLVQYWGLELKKSAISLLDTIAIAVAEGTDRIIEVVQRXCRAIYNIPRRXDXGFEAALXNK

SEQ ID NO: 335 - protein, 849 aa, HIV
MRVKGTQRNWKQWWIWGILGFWMFLIYNVRGNLWVPVYYGVPVWRDAKTTLFCASDAKAYETEVHNVWATHACVPTDPNPQEIVLQNVTENFNMWENDMVDQMHQDIISLWDQSLKPCVKLTPLCVTLHCSDANRTHNGTIVGEIKNCTFNMTTELRDKGRKVHALFYRLDIVPLESESYEDYRLINCNTSAITQACPKVSFDPIPIHYCAPAGYVILKCNNKKFNGTGPCNNVSTVQCTHGIKPVVSTQLLLNGSLAEEEIVIRSKNLSDNVKTIIVQLQTPVNITCMRPNNNTRESIRIGPGQTFYATGDIIGDIRQAHCNISKTAWNRTLQEVGKKLAEHFPNKTINFTKHSGGDLEITTHSFNCRGEFFYCNTSGLFNSTYYSTYNSTVSNTTADVNITIPCRIKQIINMWQEVGRAMYAPPIKGAITCISNITGLLLTRDGDKNDTETFRPGGGDMRDNWRSELYKYKVVEIKPLGIAPTKAKRRVVEREKRAVGLGALFFGFLGAAGSTMGAASITLTVQARQLLSGIVQQQSNLLRAIEAQQHMLQLTVWGIKQLQTRVLAIERYLKEQQLLGIWGCSGKLICTTNVPWNSSWSNKSQADIWDNMTWMQWDKEISNYTGIIYRMLEDSQNQQEKNEQDLLALDKWQNLWSWFDITKWLWYIKIFIMIVGGLIGLRIIFAVLSIVNRVRQGYSPLSFQTRTPIPRGPDRLGEIEEEGGEQDRDRSVRLVSGFLALAWDDLRSLCLFCYHRLRDLTLIAARAVELLGRSILRGLQRGWEILKYLKSLVQYWGLELKKSAISLLDTIAIAVAEGTDRIIEVIQGIGRAIYNIPRRIRQGFEAALQ

SEQ ID NO: 336 - protein, 850 aa, HIV
  misc_feature (578)..(578): Xaa can be any naturally occurring amino acid
MRVRGTQMNWSHLWKWGTLILGLVIICNASKDLWVTVYYGVPAWEDADTILFCASDAKAHSTERHNVWATHACVPTDPNPQEIHLKNVIENFNMWKNHMVEQMHEDIKSLWDESLKPCVKLTPLCVTLHCKNATFKNATINGTSEGTKNITVNNKEEMTNCSFNVTTEIEDKKKTEYALFYKLDVIPIEGKNNNGNSSAYILINCNATNIEQACPKVSFEPIPIHYCAPAGFAILKCRDKNFNGTGPCKNVSTVQCTHGIKPVVSTQLLLNGSLAGESIIIRSENITDNTKTIIVQLNQSVDIICTRPYNNTRRSIHIGPGQAFFATGDIIGDIRQAHCNISGAKWNEMLHKVIAKLKESFPGKNITFNSSAGGDLEITTHSFNCGGEFFYCNTSKLFNSSSRSNETITLPCKIRQIVRMWQKVARAMYAPPIAGNITCTSNITGLLLTRDGSKESNETEISRPGGGNMKDNWRSELYKYKVVKIKPLGIAPSKARRRVVGREKRAVGLGAVFLGFLGTAGSTMGAASITLTVQVRQLLSGIVQQQSNLLRAIEAQQHLLQLTVWGIKQLQARVLALXRYVKDQQLLGIWGCTGKLICPTNVPWNDSWSNKTFEEIWNNMTWIEWEREINNYTSHIYTLIEESQNQQEKNEQELLALDKWASLWSWFDISNWLWYIKIFIMIVGGLIGLRIVFAVLSIVNRVRQGYSPVSLQTRIPNPTGADRPGEIEEGGGEQGNTKSIRLATGFLALVWDDLRSLCLFSYHRLRDFGLIVARTVETLGHRGWEILKYLKNLVCYWGQELKNSAINLIDTIAIAVADWTDRVIEVGQRVFRAFLNIPRRIRQGLEIALL

SEQ ID NO: 337 - protein, 857 aa, HIV
MRVKETRMNWPNLWKWGTLILGLVIMCSASNNLWVTVYYGVPVWRDADTTLFCASDAKAHETEVHNVWATHACVPTDPNPQEIHLKNITENFNMWKNKMAEQMQEDVISLWDQSLKPCVQLTPLCVILHCTNANLTNVTRQTNAPSILENVTEEISNCSFNTTTELRDKKQKVYALFYKLDIVSIGGNKSNSSEYRLINCNTSVIKQACPKVSFDPIPIHYCTPAGYAILKCNDKNFNGTGPCKNVSSVQCTHGIKPVVSTQLLLNGSLAEEEIMIRSENLTDNTKNIIVHLNKSVEINCTRPSNSIRTSMTIGPGHVFYRTGDIVGDIRQAYCEVNGTKWNKVLKQVSEKLKEHFKNKTIVFRPPPGGDLEITRHHFNCRGEFFYCNTEKLFNNTCIGNETMGGCNNTIILPCRIKQIINMWQGAGQAMYAPPIKGIINCVSNITGILLTRDGGANNASNETETFRPGGGNMKDNWRSELYKYKVVQIEPLGIAPTRAKRRVVERQKRAVGIGVMIFGFLGAAGSTMGAASITLTVQARQLLSGIVQQQSNLLRAIEAQQHLLQLTVWGIKQLQARVLALERYLQDQKFLGLWGCSGKTICTTTVPWNSTWSNRSYEEIWNNMTWIEWEREINNYTSQIFDLLIESQNQQERNEKDLLELDKWTSLWSWFSITNWLWYIRIFIIIVGGLIGLRIIFAVLSIVNRVRQGYSPLSFQTPIHQQREPDRLERIEEEGGEQGRDRSVRLVTGFLALAWDDLRSLCLFIYHRLRDLILIAARTVELLGKGLRQGWEGLKYLGNLLSYWGLELKISAISLLNATAIAVAGWTDRVIEVAQRAWRAILHIPRRIRQGLERSLL

SEQ ID NO: 338 - protein, 884 aa, HIV
MKVKGTWMIWPSLWKWGTLILGLVIICSASENLWVTVYYGVPVWKDAETTLFCASDAKAHETEVHNIWATHACVPTDPNPQEIKLENVTENFNMWKNKMAEQMQEDIISLWDQSLQPCVKLTHLCVTLNCTSANLTNVNNTTNNSSKIGNITDEVNIGDMKDEVKNCSFNVTTELRDKQQKVYALFYKLDIVQIGGNNNVSSEDNNSNSENGEYRLINCNTSVIKQACPKVSFDPIPIHYCAPAGYAILKCNDKDFNGTGPCKNVSSIQCTHGIKPAVSTQLLLNGSLAEEEIIIRSANLTDNTKTIIVNLNTPVEINCTRPSEKKRMRMTTGPGHVFYKTNEITGDIRKAYCKINGTEWNKTLEQVADKLKKHFENKTIVFQPHSGGDLEITMHHFNCRGEFFYCNTSKLFNKLFNNTHRENETEGKDNDTIILPCKIKQIINMWQRTGQAMYAPPIEGKINCVSNITGILLTRDGGGINDTRENETFRPGGGNMEDNWRSELYKYKVVQIEPLGIAPTRAKRRVVEREKRAVGIGALIFGFLGAAGSTMGAASITLTVQTRQLLSGIVQQQSNLLRAIEAQQHLLQLTVWGIKQLQARVLAVERYLQDQKFLGLWGCSGKIICTTNVPWNSTWSNKSYDYIWKNMTWIQWEREISNYTDQIYEILTKSQDQQERNEKDLLELDKWASLWNWFDITRWLWYIKIFIMIVGGLIGLRIIFAVLSIVNRVRQGYSPLSFQIPIHQQRDPDRPERIEEGGGEQDRDRSTRLVSGFLALVWDDLRSLCLFSYHRLRDLLLIAARTVELLERSSLKGLRRGWEGLKYLGNLLSYWGQELKISAISLLNAIAITVAGWTDRVIEVAQAAWRAILNIPRRIRQGLERSLL

SEQ ID NO: 339 - protein, 843 aa, HIV
MRVKETQMNWLNLWKWGTLILGLVIICSASDNLWVTVYYGVPVWRDADTTLFCASDAKAHETEVHNVWATYACVPTDPNPQEIHLENVTENFNMWKNNMVEQMQEDVISLWDQSLKPCVKLTPLCVTLNCTNAALTNVTITNGPNITEEIRNCSFNMTTEIRDKKQKVYALFYKLDLVQINGSGGEYRLINCNTSVIKQACPKISFDPIPIHYCTPAGYAILKCNDKNFNGTGPCKNVSSVQCTHGIKPVVSTQLLLNGSLAEEEIIIRSENITNNAKTIIVHLNKSVEINCTRPSNNTRTSVHIGPGQAFYKIGDIIGDIRQAYCEINGTKWNETLKQVAGKLRKHFNKTISFKPPSGGDLEITMHHFNCRGEFFYCNTTKLFNSTWPENGTMEGSNGTIILPCRIKQIINMWQGVGQAMYAPPISGTINCISNITGILLTRDGGNSTTDTETFRPEGGNIKDNWRSELYKYKVVQIEPLGIAPTRAKRRVVEREKRAVGIGAMIFGFLGAAGSTMGAASITLTVQARQLLSGIVQQQSNLLRAIEAQQHLLQLTVWGIKQLQARILAVERYLKDQQFLGLWGCSGKIICTTAVPWNSTWSNRSYEEIWNNMTWIKWEREISNHTGQIYQILTESQNQQDKNERDLLELDKWTSLWNWFDISNWLWYIKIFIMIVGGLIGLRIIFAVLSIVNRVRQGYSPLSFQTPTHHQREPDRPERIEEGGGEQGRNRSVRLVTGFLSLAWDDLRSLCLFSYHRLRDLLLIVARIVELLGHRGWEALRYWWNLLQYWIQELKNSAVSLLNATAIAVAEGTDRIIEVVQRAYRAILHIPRRIRQGLERALI

SEQ ID NO: 340 - protein, 859 aa, HIV
MRVMGTQMSWQNLWRWGTMILGMIIICSAVENLWVTVYYGVPVWKDAETTLFCASDAKAYETEVHNVWATHACVPTDPNPQEIPLKNVTEEFNMWKNKMVEQMHTDIISLWDQSLKPCVKLTPLCVTLNCSNANITNTASMTVNMTEEIKNCSFNMTTELRDKSKKVYSLFYRLDVVSIDGDNSSYGNSSYSSYRLINCNTSAITQACPKVTFEPIPIHYCAPAGFAILKCNDKEFNGTGSCTNVSSVQCTHGIKPVVSTQLLLNGSLAEGEIIIRSENISDNAKTIIVQLNETVTINCTRPGNNTRKSIHIGPGQAFYATGDIIGDIRQAHCNVSRSDWNKNLRQVVTQLRKHWNRTTIIFSSSSGGDIEITTHSFNCGGEFFYCNTSGLFNSTWNINGSGGFNSTNDNITLPCRIKQIINMWQRTGQAMYAPPIKGEIRCVSNITGLLLTRDGGGNASQNETFRPGGGDMRDNWRSELYKYKVVKIEPLGVAPTGAKRRVVEREKRAVGLGAVFIGFLGAAGSTMGAASVTLTVQARQLLSGIVQQQSNLLRAIEAQQHVLRLTVWGIKQLQARVLAVERYLKDQQLLGIWGCSGKLICTTAVPWNSSWSNKSQSEIWDNMTWLEWDKEISNYTNTIYTLLEEAQNQQEKNEQDLLALDKWANLWNWFDISKWLWYIKIFIMIVGGLIGLRIVFAVLAIVNRVRQGYSPLSFQIHTPSPRDLDRPGRIEEEGGEQDRTRSIRLVSGFLALAWDDLRRLCLFSYHHLRDLILIVARTVELLGHNSLKGLRLGWEGLKYLWNLLLYWGRELKTSATNLVDTIAIAVAGWTDRVLETGQRFGRAILNIPRRIRQGFGALL

SEQ ID NO: 341 - protein, 867 aa, HIV
MRVMGTQMNWQNWWRWGTMILGMILICNAVENLWVTVYYGVPVWRDAETTLFCASDAKTYETEVHNVWATHACVPTDPNPQEIYLKNVTEDFNMWKNKMVEQMHTDIISLWDQSLKPCVTLTPLCVTLTCSNVTLNNTTPNNATASNGTFNNITVNITDEIKNCSFNVTTELRDKTKKVYSLFYKLDIVQLNSSDSNSSYYRLINCNTSAITQACPKVTFEPIPIHYCAPAGFAILKCNEKNFNGTGPCSNVSSVQCTHGIKPVVSTQLLLNGSLAEDEIIIRSENISNNAKTIIVHFNESVIINCTRPNNNRRIRIHIGPGRAFYGTNIVGNIRRAHCNVSGERWNEILRKVATQLGKHWKNKTINFTSPSGGDVEITTHSFNCGGEFFYCDTSGLFNSAWNGTNGNEMSNITNGTITLQCRIKQIVNMWQRVGQAMYAPPIPGVIRCVSNITGLLLTRDGGQDNGSSEIFRPGGGDMRDNWRSELYKYKVVQLEPLGVAPTKARRRVVEREKRAVGIGAVFIGFLGAAGSTMGAASMTLTVQARQLLSGIVQQQSNLLRAIEAQQHMLKLTVWGIKQLQARVLAVERYLRDQQLLGIWGCSGKLICTTTVPWNSSWSNKNQSEIWDNMTWLQWDKEISNYTNTIYTLLEEAQNQQEKNEQDLLALDKWANLWSWFDISNWLWYIKIFIMIVGGLIGLRIVFAVLAIINRVRQGYSPLSFQTLAPSPGDLDRPGGIDEEGGGQDRTRSIRLVSGFLALAWDDLRSLCLFSYHRLRDFISIAARTVGLLGHSSLKGLRLGWEGLKYLWNLLLYWGRELKTSAINLVDTLAIAVGGWTDSVIEIGQRFGRAILNIPRRIRQGLERALL

SEQ ID NO: 342 - protein, 859 aa, HIV
MRVRGTQMNWPYSWKWGTLILGLVIICSASDLWVTVYYGVPVWKDAATTLFCASDAKAYDTEVHNVWATHACVPTDPNPQEIDLVNVTENFNMWKNNMVEQMQEDIISLWDQSLKPCVKLTPLCVTLECQNFTSSGNMSDDLSGEIKNCSFNMTTELRDKKQRVHSLFYKLDIVPINAENNSSSKYRLINCNTSAITQACPKVTFEPIPIHYCAPAGFAILKCKDKSFNGTGPCKNVSSVQCTHGIKPVVSTQLLLNGSLAENETIIRSENITNNAKTMIIQLVKPVKITCIRPGNNTRKGIHIGPGQAFYARNNIVGDIRKAYCNVSKTKWNETLQQVVQALRKHWNKTIIFTNSSGGDLELITHSFNCGGEFFYSDTSGMFNSTWDNNSTWNNNSSMTGSNNTNDNITLPCRIKQVINMWQRVGQAMYAPPIAGIIRCESNITGLLLTRDGGNTSSTNETFRPGGGDMRDNWRSELYKYKVVQIEPLGVAPTRAKRRVVEREKRAVVGLGAVFLGFLGAAGSTMGAASITLTVQARQLLSGIVQQQSNLLRAIEAQQHLLKLTVWGIKQLQARVLALERYLRDQQLLGIWGCSGKLICTTNVPWNSSWSNKTYDSIWGNMTWLQWDREISNYTEIIYGLIEESQNQQEKNEQDLLALDKWASLWNWFDITNWLWYIKIFIMIVGGLIGLRIVFAVLNVINRVRQGYSPLSFHTLTRHQREPDRPERIEEGGGEQDRDRSVRLVNGFLALVWDDLRSLCLFSYHRLRDFILIAARTVELLGRNSLKGLRLGWEGLKYLWNLLAYWGQELKTSAITLVDAAAVAVAGWTDRVIEVAQRAGRAVLNIPRRIRQGLERALL

SEQ ID NO: 343 - protein, 857 aa, HIV
MRARGTQRNCLHLWKWGTLIIGLVIICSASDLLWVTVYYGVPVWRDANTTLFCASDAKAYDTEVHNVWATHACVPTDPNPQEIDLVNVTENFNMWKNNMVEQMQEDIISLWDQSLKPCVKLTPLCVTLECQNFNGSNNHNVSKDMQGEIKNCSFNTTTVLRDKIQKVHSLFYRLDIVPIDASNNDSSRYRLINCNASAITQACPKVTFEPIPIHYCAPAGFAILKCKDKQFNGTGLCKNVSSVQCTHGIKPVVSTQLLLNGSLAKNETIIRSENITNNAKTIIIQLVKPVNITCVRPNNNTRKGTPIGPGQAFYARNDVIGDIRKAHCEVNATEWNDTLQQVVQKLRKFWNTTIIFTEPSGGDLEVITHSFNCGGEFFYCNTSGLFNSTWGYNNSNVTRLNNTNDTIILPCKIKQIIKMWQRVGQAMYAPPIAGRIRCESNITGLLLTRDGGKNNSTNETFRPGGGDMRDNWRSELYKYKVVQIEPLGVAPTRAKRRVVEREKRAVGLGAVFLGFLGAAGSTMGAASITLTVQARQLLSGIVQQQSNLLRAIEAQQHLLKLTVWGIKQLQARVLALERYLRDQQLLGIWGCSGKLICTTNVPWNSSWSNKTYDSIWENMTWLQWDREISNYTQIIYELIEESQNQQERNEQDLLALDQWASLWNWFDITKWLWYIKIFIMIVGGLIGLRIVFAVLNVINRVRQGYSPLPFQTLTRHQREEPDRPERIKEGGGEQDRDKSVRLVNGFLALAWDDLRSLCLFSYHRLRDFILIAARTVELLGHNSLKGLRLGWEGLKYLWNLLVYWGQELKTSAITLLDATAVTVAGWTDRVIEVAQRTGRAILNVPTRIRQGLERALL

SEQ ID NO: 344 - protein, 859 aa, HIV
  misc_feature (127)..(127): Xaa can be any naturally occurring amino acid
  misc_feature (142)..(142): Xaa can be any naturally occurring amino acid
  misc_feature (858)..(858): Xaa can be any naturally occurring amino acid
MRVMGIQRNYPPLWNWGTLILGLVIICSANNLLWVTVYYGVPVWKDADTTLFCASDATAYVPEVHNVWATLPGTHRPHPQKINVGNVTKDFNMWKNNMVEQMQIDIISLWGPKLKPCEKLTPSLRHXLNSSHKVNPQDQREXKSLDGGEEIEIKNCSYNMTTELRDKKQKIYSLFYKLDVVPIGDNNETYRLINCNTSVITQACPKVTFEPIPIYYCAPAGFAILKCNDKEYNGTGPCRNVSTVQCTHGIRPVVSTQLLLNGSLAEGKVMIRSENITNNAKTIIVQFNETVEINCTRFNNNTRKSVRIGPGQTFFATGDIIGDIRKAQCAVNKTEWNKALQKVVAQLRNHFGNTTIMFANSSGGDVEITTHSFNCAGEFFYCNTSGLFNSTWNTTTSTQIPNRTTDGNITLPCRIKQIVNMWQRVGQAMYAPPIPGVIRCESNITGLMLTRDGGINKTDNETFRPGGGDMRDNWRSELYKYKVVKIEPIGIAPTKARRRVVEREKRAVGLGAVFLGFLGAAGSTMGAASITLTVQARQLLSGIVQQQSNLLRAIEAQQHLLKLTVWGIKQLQARVLALERYLKDQQLLGIWGCSGKLICHTTVPWNSSWSNKSLNDIWENMTWLQWDKEIENYTQIIYNLIEESQNQQEKNEQELLALDKWTNLWSWFSITNWLWYIRIFIMIVGGLIGLRIVFAVLSIVNRVRQGYSPLSFQTLTHHQREPDRPERIEEGGGEQGRDRSVRLVSGFLALAWDDLRSLCLFSYHRLRDFILIAARTVEILGHSSLKGLRLGWEGLKYLWNLLVYWGQELKISAINLLDTTAIVVAGWTDRVIEIAQRACRAILHIPRRIRQGFGKGFXQ

SEQ ID NO: 345 - protein, 860 aa, HIV
MRVMGIQRNYLPLWNWGTLILGLVIICSAANNLWVTVYYGVPVWREADTTLFCASDAKAYDTEVHNVWATHACVPTDPNPQEMDLENVTEDFNMWKNNMVEQMHEDIISLWDQSLKPCVKLTPLCVTLDCHNVTSSNSSCNNSRCDEGIEEIRNCSYNMTTELRDRKQKIHSLFYKLDVVSINDSSNMYRLINCNTSAITQACPKVTFEPIPIHFCAPAGFAILKCKDKSFNGTGPCTNVSTVQCTHGIKPVVSTQLLLNGSLAEGEVVIRSENLTNNAKTIIVQLAEPVQINCTRPNNNTRESIRIGPGQTFYATGDIIGDIRKAYCVVNETVWNEALKKVAEKLKGHFNKTITFAKSSGGDLEITTHSFNCGGEFFYCDTTGLFNSSWSYNGTSWNKTTTNGTTNGNITLHCRIKQIINMWQRVGQAMYAPPIRGVIRCESNITGLLLTRDGGTNNSNTTETFRPGGGDMRDNWRSELYKYKVVKIEPIGVAPTGARRRTVEREKRAVGLGAVFLGFLGAAGSTMGAASVTLTVQARQLLSGIVQQQSNLLRAIEAQQHLLKLTVWGIKQLQARVLALERYLKDQQLLGIWGCSGKLICTTTVPWNSSWSNRSYHDIWDNMTWLEWDREISNYTDKIYALIEESQNQQEKNEQELLALDKWANLWNWFGITNWLWYIKIFIMIVGGLIGLRIVFTVFSIVNRVRQGYSPLSFQTLNPHQREPDRPEGIEEGGGEQDRGRSVRLVSGFLALAWDDLRSLCLFSYHRLRDFTLIAARTVELLGRSSLKGLRLGWEGLKYLWNLLVYWIQELKISAISLLDTVAIAVAGWTDRVIEIVHRTCRAILHVPRRIRQGFERALQ

SEQ ID NO: 346 - protein, 850 aa, HIV
MRVRGMQRNWQHLGKWGLLFLGILIICNAAENLWVTVYYGVPVWRDATTTLFCASDAKAYETEVHNVWATHACVPTDPNPQEVELKNVTENFDMWKNNMVEQMHTDIISLWDQSLKPCVKLTPLCVTLNCSNVNVTNDSQNSTLKEEAGALQNCSFNMTTEIRDKQQKVHALFYRLDIVPISDNSNGSNGSGKYRLIHCNTSTITQACPKVSWDPIPIHYCAPAGFAILKCNDKKFNGTGPCKNVSTVQCTHGIKPVVSTQLLLNGSLAEESIIIRSQNISDNTKTIIVHLNEPVQINCTRPNSNTRKGIHLGPGRAFYTTGEIIGDIRKAHCNVSGAQWNKTIEQVKRKLKSHFPNATIKFNSSSGGDLEVTMHSFNCRGEFFYCNTSGLFNNTVSNGTITLPCRIKQIVNMWQEVGRAMYANPVEGSITCSSNITGLLLTRDGGGKKNTTTANKTEEIFRPGGGNMKDNWRSELYKYKVVEIEPLGVAPTKAKRQVVKREKRAVGLLGAMFLGFLGAAGSTMGAASITLTVQARQLLSGIVQQQNNLLRAIEAQQHLLQLTVWGIKQLQARVLAVERYLKDQQLLGIWGCSGKLICTTNVPWNSSWSNKSQQEIWENMTWMEWEREISNYSNEIYRLIEISQIQQEKNEQELLAFDKWASLWSWFDISSWLWYIRLFIMIVGGLIGLRIVFSVLSIVNRVRKGYSPLSLQTLIPSPREPDRPEGIEEGGGEQGKDRSVRLVNGFFALVWDDLRNLCLFSYRHLRDFILIAARIVGRGLTRGWEALKLLGNILLYWGQELKNSAISLLNTIAIVVAEGTDRVIEALQRFGRGILHIPRRIRQGFERALL

SEQ ID NO: 347 - protein, 845 aa, HIV
MRVRGMQRNWQHLGKWGLLFLGILIICNANETLWVTVYYGVPVWKEATTTLFCASDAKAYDREVHNVWATHACVPTDPSPQEVVLGNVTENFNMWKNDMVEQMHTDIISLWDQSLKPCVKLTPLCVTLNCINATGTNAINGTNTTNGTQNSALREDPGAVQNCSFNMTTEIRDRQQRVRALFYKLDLVPINSGQNNSTNCNSSTITQACPKVSWDPIPIHYCAPAGYAILKCNDEKFNGTGPCTNVSTVQCTHGIKPVVSTQLLLNGSLAKETIIIRSQNISDNAKTIIVHLNESVQINCTRPNNNTRKSINIGPGRAFYATEQIIGDIRKAHCNVNGTHWNETLERVKAELNSYFPNKTIIFNSSSGGDLEITMHSFNCRGEFFYCNTSGLFNNTGYNGTITLPCRIKQIVNMWQEVGRAMYTNPIAGSITCNSNITGLLLTRDGGQNNNSTNETFRPGGGNMKDNWRSELYKYKVVEIEPLGIAPTRAKRQVVTREKRAVGMGAMFIGFLGAAGSTMGAASITLTVQARQLLSGIVQQQSNLLKAIEAQQHLLQLTVWGIKQLQARVLAVERYLKDQQLLGIWGCSGKLICTTTVPWNSTWSNKSEQEIWGNMTWMEWEKEISNYTQGIYRLLEASQNQQEKNEQELLALDQWASLWSWFDITHWLWYIRIFIMIVGGLIGLRIVFAVLSIVNRVRKGYSPLSLQTRLPSPREPDRPEEIEEGGGEQGKDRSVRLVNGFLALVWDDLRNLCLFIYHHLRDFILIAARIVERGMRRGWEALKHLGSLLQYWSQELRNSAISLLNTTAIVVAEGTDRALEALQTIGRGILHIPRRIRQGLERALL

SEQ ID NO: 348 - protein, 844 aa, HIV
MRVRGMQRNWQHLGRWGLLFLGILIICSAADNLWVTVYYGVPVWKEATTTLFCASDAKAYEREVHNVWATHACVPTDPSPHEEFLENVTENFNMWKNNMVEQMHDDIISLWDQSLKPCVKLTPLCVTLNCTDAVRATNGTHNSTLKEDPGAIQNCSFFMTTEVRDKKQKVHALFYRLDIVPISNSSNSSSGEYRLINCSTSAITQACPKVSWEPIPIHYCAPAGYAILKCNDKRFNGTGPCRNVSTVQCTHGIKPVVSTQLLLNGSLAEEKIIIRSQNISDNAKTIIVHLNESVQINCTRPNNNTRKSIHLGPGHAFHTTGKIIGDIRKAHYNISGTQWNKTLRQVKEELKSHFPNGTISFKPASGGDLEVTMHSFNCRGEFFYCNTSNLFNDTIGNGTIILPCKIRQIVNMWQEVGRAMYAAPIAGNIACNSTITGLLLTRDGGSGSNGTNQNETFRPGGGNMKDNWRSELYKYKVVEIEPLGIAPTRAQRQVVKREKRAALGVVFLGFLAAAGSTMGAASITLTVQARQLLSGIVQQQNNLLKAIDAQQHLLQLTVWGIKQLQARLLAVERFLKDQQLLGLWGCSGKLICTTNVPWNSSWSNKSQEEIWGNMTWMEWEKEISNYSDQIYRLIEQSQNQQEKNEQELLALDQWASLWNWFNITNWLWYIKIFIMIVGGLIGLRIVFAVLAIVNRVRKGYSPLSFQTHIPSPPEPDRPEGIEEGGGEQGKDRSVRLVSGFLALVWDDVRNLCLFSYRHLRDFILVAARIVNRGLRRGWEALKLLGNLLLYWSQELKNSAISLLNTTAIVVAEGTDRILEALQTIGRGILHIPRRIRQGLERSLL

SEQ ID NO: 349 - protein, 862 aa, HIV
MRVKGIKKNCQRLWKWGMMLLGLLMICNANDQWWVTVYYGVPVWKEATTTLFCASDAKGYETEVHNVWATHACVPTDPNPQEIVLGNVTENFNMWKNDMVEQMHEDIISLWDQSLKPCVKLTPLCVTLKCAAFNGTVHNNTQGIDSTLKEEPEAIQNCSFNMTTELRDKQQKVHALFYKLDIVPLNSDGNNSSEKYYRLINCNTSTITQACPKVSWDPIPIHYCAPAGYAILKCNNKTFNGTGPCTNVSTVQCTHGIKPVVSTQLLLNGSLAEKDIVIRSQNLSDNAKIIIVHLNESIQINCTRPNNNTRKSIGIGPGRAFYATGDIIGDIRKAHCNVSRTQWRKKLRQVKGELKSQFNGANITFNSSSGGDLEITMHSFNCRGEFFYCNTSGLFNDTEIEANHTNANDNDTIILPCKIKQMINMWQEVGRAMYAAPVAGNIICNSNITGLLLTRDGGNKTHNDTRNEIFRPGGGNMKDNWRSELYKYKVVRIEPLGVAPTRARRRVVQREKRAVTMGAMFLGFLGAAGSTMGAASLTLTVQARQLLSGIVQQQNNLLKAIEAQQHLLQLTVWGIKQLQARVLAVERYLQDQQLLGLWGCSGKLICTTNVPWNKNWSSTWRTKSLDDIWDNMTWMEWEREIDNYTRTIYNLIEESQNQQEKNEQDLLALNKWTSLWSWFDITHWLWYIKIFIMIVAGLVGLRIVFAVLSIVNRVRQGYSPLSFQTRLPAPRGPDRPEGTEGEGGERDRDRSGRLVTGFLALIWDDLRSLCLFSYHRLRDLLLIVARILELLGRRGWELLKYLWSLLQYWSQELKNSAVSLLNTIAIAVAEGTDRIIEAIQRIGRGILHIPRRIRQGFERSLL

SEQ ID NO: 350 - protein, 852 aa, HIV
MRAKGIKKSCQLLWRWGIMLLGMLMICSTMGQLWVTVYYGVPVWKEATTTLFCASNAKAYDTEVHNVWATHACVPTDPNPQEMVLGNVTENFNMWKNDMVEQMNEDIISLWDQSLKPCVKLTPLCVTLNCTTFNGTRTQNSTLEQNSTLKEEPGAIQNCSFNMTTEVRDKQQKVHALFYRLDITPINNNNSNDSAYRLINCNTSTITQACPKISWDPIPIHYCAPAGYAILKCNNKKFNGTGPCKNVSTVQCTHGIKPVVSTQLLLNGSLAEEDIIIRSQNISDNAKIIIVHLNESVQINCTRPNNNTRKSISIGPGRAFYTTGEIIGDIRKAYCNVSRTQWHKKLNQVRAELKHHFPNKTINFTSSSGGDLEITMHSFNCRGEFFYCNTSGLFNDTELVNNTENNGTTIILPCKIKQIVNMWQEVGRAMYAAPVAGSITCNSNITGILLTRDGGNTDNTTETFRPGGGNMKDNWRSELYKYKVVRIEPLGLAPTKARRRVVQREKRAVTMGAMFLGFLGAAGSTMGAASMTLTVQARQLLSGIVQQQNNLLKAIEAQQHMLQLTVWGIKQLQARVLAVERYLQDQRLLGLWGCSGKLICTTNVPWNNSWSNKSLEKIWDNMTWMEWEREIDNYTSIIYNLIEESQNQQEKNEQELLELDKWASLWNWFTITNWLWYIKIFIMIVGGLVGLRIVFTVLSIVNRVRQGYSPLSFQTRLPAPRGPDRPEGIEEEGGERDSNRSGRLVTGFLPLIWDDLRSLCLFSYHRLRDLLLIVVRIVELLGRRGWEALKYWWNLLKYWSQELKNSAVSLLNALAIAVGEGTDRVIEAAQVIGRGILHIPRRIRQGLERALL

SEQ ID NO: 351 - protein, 861 aa, HIV
MRVKGIRKSCQLWWKWGIMLLGMLMICSTMENTWVTVYYGVPVWKEAATTLFCASDAKAYDTEVHNVWATHACVPTDPNPQEMVLKNVTENFNMWKNNMVDQMHEDIISLWDQSLKPCVKLTPLCVTLNCTAFNGTQNKHQNNTLKDTQQNNTLEEESGAIQNCSFNVTTEVRDKPQEVHALFYKLDILPISGNDNKSEKFRLIHCNTSTITQACPKVSWDPIPIHYCAPAGYAILKCNDKKFNGTGPCKNVSTVQCTHGIKPVVSTQLLLNGSLAEEDIIIRSQNISDNAKIIIVHLNESVQINCSRPNNNTRKGIPIGPGRAFYTTGEIIGDIRKAHCNISGTQWHKKLEQVKAELKSQFPNTTTIQFNSSSGGDLEITMHSFNCRGEFFYCNTSKLFNNKTNNNTGTNGTTDTIILPCKIKQIINMWQEVGRAMYAAPIAGNIICNSNITGLLLTRDGGGKETQNKTEIFRPGGGDMRDNWRSELYKYKVVQIEPLGVAPTRARRRVVQREKRAVTLGAMFLGFLGAAGSTMGAASMTLTVQARQLLSGIVQQQNNLLKAIEAQQHLLQLTVWGIKQLQARVLAVERYLQDQQLLGLWGCSGKLICTTNVPWNASWSNKTLDKIWNNMTWMEWEREVDNYTGLIYSLLEESQNQQEKNEQDLLSLDTWASLWSWFTITNWLWYIKIFIMIVGGLIGLRIVFTVISIVNRVRQGYSPLSFQTRLPTPRGPDRPEGTEEEGGERDRDRSRRLVTGFLALIWDDLRSLCLFCYHRLRDLLLIVARIVELLGRRGWEALKYWWNLLQYWIQELKNSATSLLNTIAITVAEGTDRVIEAAQKIDRGILHIPRRIRQGLERALQ

SEQ ID NO: 352 - protein, 831 aa, HIV
  misc_feature (13)..(13): Xaa can be any naturally occurring amino acid
  misc_feature (48)..(48): Xaa can be any naturally occurring amino acid
  misc_feature (133)..(151): Xaa can be any naturally occurring amino acid
  misc_feature (196)..(196): Xaa can be any naturally occurring amino acid
  misc_feature (201)..(201): Xaa can be any naturally occurring amino acid
  misc_feature (266)..(266): Xaa can be any naturally occurring amino acid
  misc_feature (278)..(278): Xaa can be any naturally occurring amino acid
  misc_feature (360)..(360): Xaa can be any naturally occurring amino acid
  misc_feature (687)..(687): Xaa can be any naturally occurring amino acid
  misc_feature (708)..(708): Xaa can be any naturally occurring amino acid
  misc_feature (722)..(722): Xaa can be any naturally occurring amino acid
  misc_feature (807)..(807): Xaa can be any naturally occurring amino acid
  misc_feature (811)..(811): Xaa can be any naturally occurring amino acid
  misc_feature (815)..(815): Xaa can be any naturally occurring amino acid
MRVTGIMKNYQHXWKWGIMLLGILMISSATEKLWVTVYYGVPVWKEAXTTLFCASDAKAYDTEVHNIWATHACVPTDPNPQEVVLVNVTENFNMWKNNMVEQMHEDIISLWDQSLKPCVKLTPLCVTLNCTNXXXXXXXXXXXXXXXXXXXEIKNCSFNVTLGIKSKMQKEYALFYRSDVVPIDNNSNSTNYMLIXCNTSXLTQACPKISFEPIPIHYCAPAGFAILKCNDKKFNGTGPCKNVSTVQCTHGIRPVVSTQLLLNGSXAEEDIIIRSQNXSDNAKTIIVHLNESVQINCTRPNNNTRKSIHIAPGRAFYATGDIIGDIRQAYCNVSREQWNKTLERVRGKLRSLFNKTIKFXSSSGGDPEVTMHNFNCRGEFFYCNTTELFNDTESNNTIITLPCRIKQIINMWQEVGRAMYAAPIAGNITCSSNITGLLLTRDGGLANQTGNQNDTFRPGGGDMRDNWRSELYKYKVVEIEPLGIAPTTAKRRVVQREKRAVGSTMGAASVTLTVQARQLLSGIVQQQNNLLKAIEAQQHLLQLTVWGIKQLQARVLAVERYLQDQQLLGLWGCSGKLICTTNVPWNSSWSNKTYQEIWGNMTWMEWEKEINNYSQEIYRLIEDSQNQQEKNEQELLALDKWASLWNWFDISNWLWYIKIFIMIVGGLVGLRIVFSVLSIVNRVRQGXSPLSFQTRHPAQRGPDRPEGXEEEGGERDRDRSRXLVDGFLTLIWVDLRSLCLFIYHRLRDLLLIAARIVELLGRRGWEALKYWWNLLQYWRQELKNSAISLLNATAIAVAEGTDRVIEXLQRXGRAXLHIPTRIRQGLERALL

SEQ ID NO: 353 - protein, 846 aa, HIV
  misc_feature (18)..(18): Xaa can be any naturally occurring amino acid
  misc_feature (24)..(24): Xaa can be any naturally occurring amino acid
  misc_feature (48)..(48): Xaa can be any naturally occurring amino acid
  misc_feature (67)..(67): Xaa can be any naturally occurring amino acid
  misc_feature (222)..(222): Xaa can be any naturally occurring amino acid
  misc_feature (288)..(288): Xaa can be any naturally occurring amino acid
  misc_feature (302)..(302): Xaa can be any naturally occurring amino acid
  misc_feature (364)..(364): Xaa can be any naturally occurring amino acid
  misc_feature (373)..(373): Xaa can be any naturally occurring amino acid
  misc_feature (391)..(391): Xaa can be any naturally occurring amino acid
  misc_feature (401)..(401): Xaa can be any naturally occurring amino acid
  misc_feature (468)..(468): Xaa can be any naturally occurring amino acid
  misc_feature (477)..(477): Xaa can be any naturally occurring amino acid
  misc_feature (479)..(479): Xaa can be any naturally occurring amino acid
  misc_feature (604)..(604): Xaa can be any naturally occurring amino acid
  misc_feature (628)..(628): Xaa can be any naturally occurring amino acid
  misc_feature (632)..(632): Xaa can be any naturally occurring amino acid
  misc_feature (642)..(642): Xaa can be any naturally occurring amino acid
  misc_feature (651)..(651): Xaa can be any naturally occurring amino acid
  misc_feature (689)..(689): Xaa can be any naturally occurring amino acid
MRVKEIQRNWQYLWTMWXLILGLXIICSASNNLWVTVYYGVPVWEDAXTPLFCASNAKAYSTEKHNXWATHACVPTDPNPQEMTLENVTEPFNMWKNNMVEQMHDDIISLWDESLKPCVMLTPLCVTLTCTNATCNKTNVKCEDVGNLKNCSFNVTTELRDKKKKEYAIFYKLDVVPIDGNSNNESGDYRLINCNVSTITQACPKVTFDPIPIHYCAPAGFXILKCKEKNFNGTGQCKNVSSVQCTHGIKPVVSTQLLLNGSLAEEEIVIRSKNFSDNAQVLIVQLNXSIEINCTRPNNNTXKSIGFGPGQTFYATGDIIGDIREAHCNVSRTRWNETLKNVKAQLHKIFNKTILFNSSIGGDXEITTHSFNXRGEFFYCNTSRLFGLFNXSGSDNLTIPXRIKQIVRMWQRVGQAMYAPPIEGIITCRSNITGLLLTRDGGNINSTNDTFRPGGGDMKDNWRSELYXYKVVKIKPXGXAPTKARRRVVQREKRAVGMGAVFLGFLGAAGSTMGAASITLTVQVRQLLSGIVQQQSNLLRAIEAQQHLLQLTVWGIKQLQARVLAVERYLKDQQLLGIWGCSGKLICTTNVPWNTSWSNKSYDXIWGNMTWIQWEREVGNYTQHIYDXIEEXQNQQEKNEQXLLALDKWAXLWNWFDISNWLWYIRIFIMIVGGLIGLRIVFAVLSIVXRVRQGYSPLSFQTLTHHQREPDRPEGIEEGGGEQDRDRSIRLVNGFLALAWEDVRNLCLFSYHRLRDFILIAARTVELLGRSSLQGLRLGWEGLKYLWNLLLYWSRELKNSAINLVDTIAIAVAGWTDRVIEVAQRACRAIINIPRRIRQGFERALL

SEQ ID NO: 354 - protein, 868 aa, HIV
  misc_feature (6)..(6): Xaa can be any naturally occurring amino acid
  misc_feature (20)..(20): Xaa can be any naturally occurring amino acid
  misc_feature (30)..(32): Xaa can be any naturally occurring amino acid
  misc_feature (265)..(265): Xaa can be any naturally occurring amino acid
  misc_feature (276)..(276): Xaa can be any naturally occurring amino acid
  misc_feature (291)..(292): Xaa can be any naturally occurring amino acid
  misc_feature (354)..(354): Xaa can be any naturally occurring amino acid
  misc_feature (362)..(363): Xaa can be any naturally occurring amino acid
  misc_feature (367)..(367): Xaa can be any naturally occurring amino acid
  misc_feature (514)..(514): Xaa can be any naturally occurring amino acid
  misc_feature (588)..(588): Xaa can be any naturally occurring amino acid
  misc_feature (641)..(641): Xaa can be any naturally occurring amino acid
  misc_feature (666)..(666): Xaa can be any naturally occurring amino acid
  misc_feature (669)..(669): Xaa can be any naturally occurring amino acid
  misc_feature (675)..(675): Xaa can be any naturally occurring amino acid
  misc_feature (718)..(718): Xaa can be any naturally occurring amino acid
  misc_feature (755)..(755): Xaa can be any naturally occurring amino acid
  misc_feature (763)..(763): Xaa can be any naturally occurring amino acid
  misc_feature (786)..(786): Xaa can be any naturally occurring amino acid
  misc_feature (810)..(810): Xaa can be any naturally occurring amino acid
  misc_feature (831)..(831): Xaa can be any naturally occurring amino acid
  misc_feature (837)..(837): Xaa can be any naturally occurring amino acid
  misc_feature (865)..(865): Xaa can be any naturally occurring amino acid
MRVKGXQRNWQHLWTWGTLXFGLMIICSAXXXLWVTVYYGVPVWEDADTPLFCASDAKAYSTEKHNVWATHACVPTDPNPQEMILENVTEPFNMWKNNMVEQMNEDIISLWDESLKPCVKLSSLCITLNCTTANVNCSQEINNTCEEKENIKNCSFNVTTEIRDRSKKEYALFYKLDIVPIDSNSNNKNSTNTSDSYSDYRLINCNVSTIKQACPKVSFDPIPIHYCAPAGFAILKCRDKNFNGTGQCKNVSSVQCTHGIKPVVXTQLLLNGSLAXEEIVIRSENLTNNAXXIIVQLNKSIEINCTRPNNNTRKSIGIGPGQMFYATGEIIGDIREAHCNVSRTDWNETLQNVXAQLKRVFXXTNVXFDSSTGGDLEITTHSFNCRGEFFYCNTSGLFNKSGLSNNSPGNSSVITLPCRIKQIVRMWQRVGQAMYAPPIAGAITCRSNITGILLTRDGGNRNNTKNETFRPGGGDMRDNWRSELYKYKVVKIKPLGIAPTKARRRVVQREKRAXGMGAVFLGFLGAAGSTMGAASITLTVQVRQLLSGIVQQQSNLLRAIEAQQHLLQLTVWGIKQLQARVLALERYXKDQQLLGIWGCSGKLICTTNVPWNTSWSNKSYDEIWGNMTWIQWEREVSNYTXQIYTLIEESQNQQEKNEQELLALDXWAXLWSWFXITNWLWYIRIFIMIVGGLIGLRIVFAVLSIVRRVRQGYSPLSXQTLTHHQGEPDRPERIEEGGGEQDRGRSIRLVNGFLXLAWDDVRXLCLFSYRRLRDFILIVARTAELXGRSSLQGLRLGWEGLKYLWNLLLXWGRELKNSAINLFDTIAIAVXNWTDRXIEVAQRAGRAIINIPRRIRQGFERALLXALL

SEQ ID NO: 355 - protein, 859 aa, HIV
  misc_feature (663)..(663): Xaa can be any naturally occurring amino acid
MRVKGIQRNWQHLWTWWTLILGLVIICSTSNQLWVTVYYGVPVWEDADTPLFCASDAKAYSTEKHNVWATHACVPTDPNPQEISLKNITEPFNMWKNNMVEQMQEDIISLWDESLKPCVKLTPLCVTLKCTNITCPNGDSTGDNATCAEAGNLTNCTFNITTEIRDKRKAEYALFYRLDVVPIDGANGSRDYRLINCNVSTIKQACPKVSFDPIPIHYCAPAGFAILKCREGNFSGKGECKNVSSVQCTHGIKPVVSTQLLLNGSLAEGEIVIRSENITNNAKNIIVQLNESIAINCTRPNNNTRKSIRIGPGQAFYATGGIIGNIRQAYCNISRTKWKEVLQNVRAQLGKIYNNTNITNIIFKPHAGGDLEITTHSFNCRGEFFYCDTSELFNSSELFNTSGSNDTITLPCKIKQIVRMWQRVGQAMYAPPIAGNITCRSNITGLLLTRDGGNNNNTNTTEVFRPGGGDMRDNWRSELYKYKIVKIKPLGIAPTKARRRVVEREKRAVGLGAFFLGFLGTAGSTMGAASITLTVQVRQLLSGIVQQQSNLLRAIEAQQHLLQLTVWGIKQLQARVLAVERYLKDQQLLGIWGCSGKLICTTNVPWNTSWSNKSYNEIWDNMTWIQWEREVSNYTQEIYRLIEESQTQQEKNEQDLLALDKWXSLWSWFDITNWLWYIKIFIMIVGGLIGLRIVFAVLSIVNRVRKGYSPLSFQTLTRHWREPDRPEGIEEGGGEQDRDRSVRLVSGFLALAWDDLRSLCLFCYHRLRDFILVITRTVELLGRSSLQGLRLGWEGLKYLGNLLLYWGRELKNSAINLIDTIAIAVANWTDRVIEVAQRACRAIFNIPRRIRQGLERALQ

SEQ ID NO: 356 - protein, 856 aa, HIV
  misc_feature (295)..(295): Xaa can be any naturally occurring amino acid
  misc_feature (623)..(623): Xaa can be any naturally occurring amino acid
  misc_feature (672)..(672): Xaa can be any naturally occurring amino acid
  misc_feature (685)..(685): Xaa can be any naturally occurring amino acid
  misc_feature (696)..(696): Xaa can be any naturally occurring amino acid
  misc_feature (753)..(753): Xaa can be any naturally occurring amino acid
  misc_feature (828)..(828): Xaa can be any naturally occurring amino acid
  misc_feature (853)..(855): Xaa can be any naturally occurring amino acid
MKAKGIQRNCQRLWKWGVTLIGMLMICNAVEQLWVTVYYGVPVWKETTTTLFCASDARAYDTEVHNVWATHACVPTDPSPLEVVLENVTENFNMWKNNMVEQMHEDIISLWDQSLKPCVKLTPLCVTLDCTNLNETESGNSTTNSSSWGEMKNCSFNVTSITRDKVQKQYAYFYNLDIVQIDSESNSTKYRLISCNTSIITQACPKVTFEPIPIHYCAPAGFAILKCNDKKFNGTGPCTNVSTVQCTHGIRPVVSTQLLLNGSLAEKEVIIRSENFTDNAKTIIVQLNKSVVINXSRPNNNTRKSIPIGPGRAFYATGQIIGDIRQAHCNLSKAQWDKTLRQVAGELRKQFEEDKTISFNKSSGGDPEIVMHTFNCGGEFFYCNTTQLFNSTWKSNSTENDTENNSLITLPCKIKQIVNMWQEVGKAMYAPPISGQIRCSSNITGLLLIRDGGNNNKSEVFRPGGGNMKDNWRSELYKYKVVKIEPLGVAPTRAKRRVVQREKRAVGIGALLFGFLGAAGSTMGAASMTLTVQARQLLSGIVQQQNNLLRAIEAQQHMLQLTVWGIKQLQARVLAVERYLKDQQLLGIWGCSGKLICTTTVPWNASWSNKSLDDIWNNMTWMXWEKEIDNYTGLIYNLIEQSQNQQERNEQELLELDKWASLWSWFSITNWXWYIRIFIMIIGGXIGLRIVFAVLXIINRVRKGYSPLSFQTLTHHQREPDRPGRIEEEGGEQDKDKSIRLVSGFLALAWDDXRSLCLFSYHRLRDFILIAARTVELLGRGSLKGLRLGWEGLKYLWNLLLYWGQELKNSAINLFDIIAIAVANWTDXAIEIVQRIGRAFLNIPTRIRQGLEXXXL

SEQ ID NO: 357 - protein, 839 aa, HIV
MGMQIGWPFFCLMISLTIGSKKYWATVYYGVPVWRDVETVLFCASDAKAHSTEAHNIWATQACVPTDPNPQEVPLDNVTEPFNMWENKMAEQVQEDIISLWEQSLKPCVKLTPLCVTMNCSNSNGNRTTDEKEKPGNGTDLEARHMKNCSFNITTEIHDKKKQAYSLFYVEDVVPLNDGNNSTYRLINCNTTAVTQACPKTTFEPIPIHYCAPPGFAIMKCNEANFNGTGECKNVSTVQCTHGIKPVISTQLILNGSLDKDIVIRNNSGGNLLVQWNEIVTMNCTRPGNNTGGQVQIGPAMTFYNIEKIVGDIRQAHCNVSNEWRSMWNKTKEKIKSLLGNNITFKAQEKNGGDPEVTHLMFNCGGEFIYCNTSRLFNESMNTNGTNGTITLPCRIRQIVNLWTRVGKGIYAPPIRGNLTCNSTITGLILEHSGGSNGTVYPTGGNMVNLWRQELYKYKTVSIEPIGVAPGKAKRRTVSREKRAAFGLGALFLGFLGAAGSTMGAASITLTVQARTLLSGIVQQQNNLVRAIEAQQHLLQLSIWGIKQLRAKVLAIERYLRDQQILSLWGCSGKTICYTTVPWNETWSNNTSYDTIWGNLTWQQWDRKVRNYSGVIFELIEKAQEQQNTNEKSLLELDQWASLWNWFSITNWLWYIKIAIMVVAGIIGIRIISVIITIIARVRQGYSPLSLQTLIPTTTTRGPDRPEETEEGVGGQGRDRSVRLVSGFLTLVWEDFRNLLIFLYHRLTDSLLILQRTLELLGRSLIRGLQLLNELRTRLWGIIAYWGKELKDSAISLLNTIAIVVAEGTDRLIELAQRIGRGILHIPRRIRQGLERALL

SEQ ID NO: 358 - protein, 852 aa, HIV
MKVMGMQSGWMGMKSGWLLFYLLVSLIKVIGSEQHWVTVYYGVPVWREAETTLFCASDAKAHSTEAHNIWATQACVPTDPNPQEVLLPNVTEKFNMWENKMADQMQEDIISLWEQSLKPCVKLTPLCVTMLCNDSYGEERNNTNMTTREPDIGYKQMKNCSFNATTELTDKKKQVYSLFYVEDVVPINAYNKTYRLINCNTTAVTQACPKTSFEPIPIHYCAPPGFAIMKCNEGNFSGNGSCTNVSTVQCTHGIKPVISTQLILNGSLNTDGIVIRNDSHSNLLVQWNETVPINCTRPGNNTGGQVQIGPAMTFYNIEKIVGDIRQAYCNVSKELWEPMWNRTREEIKKILGKNNITFRARERNEGDLEVTHLMFNCRGEFFYCNTSKLFNEELLNETGEPITLPCRIRQIVNLWTRVGKGIYAPPIRGVLNCTSNITGLVLEYSGGPDTKETIVYPSGGNMVNLWRQELYKYKVVSIEPIGVAPGKAKRRTVSREKRAAFGLGALFLGFLGAAGSTMGAASITLTVQARTLLSGIVQQQNILLRAIEAQQHLLQLSIWGIKQLQAKVLAIERYLRDQQILSLWGCSGKTICYTTVPWNETWSNNTSYDTIWNNLTWQQWDEKVRNYSGVIFGLIEQAQEQQNTNEKSLLELDQWDSLWSWFGITKWLWYIKIAIMIVAGIVGIRIISIVITIIARVRQGYSPLSLQTLIPTARGPDRPEETEGGVGEQDRGRSVRLVSGFSALVWEDLRNLLIFLYHRLTDSLLILRRTLELLGQSLSRGLQLLNELRTHLWGILAYWGKELRDSAISLLNTTAIVVAEGTDRIIELAQRIGRGILHIPRRIRQGLERALI

SEQ ID NO: 359 - protein, 836 aa, HIV
  misc_feature (364)..(364): Xaa can be any naturally occurring amino acid
  misc_feature (404)..(404): Xaa can be any naturally occurring amino acid
  misc_feature (419)..(419): Xaa can be any naturally occurring amino acid
  misc_feature (596)..(596): Xaa can be any naturally occurring amino acid
MGMQSGWPFFCLLISLTIGSDPHWVTVYYGVPVWRDAETVLFCASDAKAHSTEAHNIWATQACVPTDPNPQEVLLTNVTEYFNMWENKMAEQMQEDIISLWEQSLKPCVKLTPLCVTMLCNNSNGNSAGNSTTNRTEDLEDRQMKNCSFNITTEIRDRKKQVYSLFYVEDVVPIKDGTDNNTYRLINCNTTAVTQACPKTTFEPIPIHYCAPPGFAIMKCNEGNFSGNGSCTNVSTVQCTHGIKPVISTQLILNGSLDTDDIVIRHHGGNLLVQWNETVSINCTRPGNNTGGQVQIGPAMTFYNIEKIVGDVRQAYCNVSEEWGSMWNKTKKKIKRLLGNNTTFKAQDKNGGDLEVTHLMFNCXGEFFYCNTSRLFNESENKTNKTIILPCRIKQIVBLWTRVXKGIYAPPIRGNLSCXSSITGLILEHSGENGNKTVYPSGGNMVNLWRQELYKYKVVSIEPIGVAPGKAKRRTVSREKRAAFGLGALFLGFLGAAGSTMGAASITLTVQARTLLSGIVQQQNNLLRAIEAQQHLLQLSIWGIKQLRAKVLAIERYLRDQQILSLWGCSGKTICYTTVPWNDTWSSNTSYDTIWXNLTWQQWDRKVRNYSGVIFDLIEQAQEQQNTNEKALLELDQWASLWNWFDITKWLWYIKIAIMVVAGIIGIRIISAIITIIARVRQGYSPLSLQTLIPTAARGPDRPEETEEGVGGQDRGRSVRLVSGFLALIWEDLRNLLIFLYHRLADSLLIIRRTLEILGQSLSRGLQLLNELRIRLWGIIAYWGKELKDSAISLLNTTAIVVAEGTDRFIELAQRIGRGILHIPRRIRQGLERALL

SEQ ID NO: 360 - protein, 859 aa, HIV
  misc_feature (568)..(568): Xaa can be any naturally occurring amino acid
MKAMEKRNKKLWTLYLAMALITPCLSLRQLYATVYAGVPVWEDATPVLFCASDANLTSTEKHNIWASQACVPTDPTPYEYPLHNVTDDFNIWKNYMVEQMQEDIISLWDQSLKPCVQMTFLCVQMECTNIAGTTNENLMKKCEFNVTTVIKDKKEKKQALFYVSDLMELNETSSTNKTNSKMYTLTNCNSTTITQACPKVSFEPIPIHYCAPAGYAIFKCNSTEFNGTGTCRNITVVTCTHGIRPTVSTQLILNGTLSKGKIRMMAKDILEGGKNIIVTLNSTLNMTCERPQIDIQEMRIGPMAWYSMGIGGTAGNSSRAAYCKYNATDWGKILKQTAERYLELVNNTGSINMTFNHSSGGDLEVTHLHFNCHGEFFYCNTAKMFNYTFSCNGTTCSVSNVSQGNNGTLPCKLRQVVRSWIRGQSGLYAPPIKGNLTCMSNITGMILQMDNTWNSSNNNVTFRPIGGDMKDIWRTELFNYKVVRVKPFSVAPTRIARPVISTRTHREKRAVGLGMLFLGVLSAAGSTMGAAATTLAVQTHTLLKGIVQQQDNLLRAIQAQQQLLRLSXWGIRQLRARLLALETLLQNQQLLSLWGCKGKLVCYTSVKWNRTWIGNESIWDTLTWQEWDRQISNISSTIYEEIQKAQVQQEQNEKKLLELDEWASIWNWLDITKWLWYIKIAIIIVGALVGVRVIMIVLNIVKNIRQGYQPLSLQIPNHHQEEAGTPGRTGGGGGEEGRPRWIPSPQGFLPLLYTDLRTIILWTYHLLSNLASGIQKVISYLRLGLWILGQKIINVCRICAAVTQYWLQELQNSATSLLDTLAVAVANWTDGIIAGIQRIGTGIRNIPRRIRQGLERSLL

SEQ ID NO: 361 - protein, 872 aa, HIV
MKVMKKNNRKSWSLYIAMALLIPCLSYSKQLYATVYSGVPVWEEAAPVLFCASDANLTSTEQHNIWASQACVPTDPNPHEFPLGNVTDNFDIWKNYMVDQMHEDIISLWEQSLKPCEKMTFLCVQMNCVDLQTNKTGLLNETINEMRNCSFNVTTVLTDKKEQKQALFYVSDLSKVNDSNAVNGTTYMLTNCNSTIIKQACPKVSFEPIPIHYCAPTGYAIFKCNDTDFNGTGLCHNISVVTCTHGIKPTVSTQLILNGTLSREKIRIMGKNITESAKNIIVTLNTPINMTCIREGIAEVQDIYTGPMRWRSMTLKRSNNTSPRSRVAYCTYNKTVWENALQQTAIRYLNLVNQTENVTIIFSRTSGGDAEVSHLHFNCHGEFFYCNTSGMFNYTFINCTKSGCQEIKGSNETNKNGTIPCKLRQLVRSWMKGESRIYAPPIPGNLTCHSNITGMILQLDQPWNSTGENTLRPVGGDMKDIWRTKLYNYKVVQIKPFSVAPTKMSRPIINIHTPHREKRAVGLGMLFLGVLSAAGSTMGAAATALTVRTHSVLKGIVQQQDNLLRAIQAQQHLLRLSVWGIRQLRARLQALETLIQNQQRLNLWGCKGKLICYTSVKWNTSWSGRYNDDSIWDNLTWQQWDQHINNVSSIIYDEIQAAQDQQEKNVKALLELDEWASLWNWFDITKWLWYIKIAIIIVGALIGIRVIMIILNLVKNIRQGYQPLSLQIPVPHRQEAETPGRTGEEGGEGDRPKWTALPPGFLQQLYTDLRTIILWTYHLLSNLISGIRRLIDYLGLGLWILGQKTIEACRLCGAVMQYWLQELKNSATNLLDTIAVSVANWTDGIILGLQRIGQGFLHIPRRIRQGAERILV

SEQ ID NO: 362 - protein, 863 aa, HIV
  misc_feature (92)..(92): Xaa can be any naturally occurring amino acid
  misc_feature (611)..(611): Xaa can be any naturally occurring amino acid
  misc_feature (614)..(615): Xaa can be any naturally occurring amino acid
  misc_feature (641)..(641): Xaa can be any naturally occurring amino acid
  misc_feature (725)..(725): Xaa can be any naturally occurring amino acid
  misc_feature (840)..(840): Xaa can be any naturally occurring amino acid
MIVTMRAMEKKNKKLGILYIVMALIIPCLSSSQLYATVYAGVPVWEEAAPVLFCASDANLTSTEKHNVWASQACVPTDPTPHEYLLKNVTDXFBIWKNYMVEQMQEDIISLWDQSLKPCVQMTFMCVQMNCTDIENKNSSSENPMKKCEFNITTVLKDKKEKKQALFYRADLTEIRDNSTNSTIYTLINCNSTTIKQACPKVSFEPIPIYYCAPAGYAIFKCNNAEFNGTGKCNNISVVTCTHGIKPTVSTQLILNGTLSKEKIRIMGQNISATAQNIIVTLSSAVNITCVRPGNKTVQEMRIGPMAWYSMAISGTNSSRVAYCQYNTTEWEKALKNTAERYLELINKTEENTTIMFNRSHDGDVEVTHLHFNCHGEFFYCNTSGMFNYTFLCNGTNCKNQSTHSNNGTIPCKLKQVVRSWMRGGSGLYAPPIPGNLTCMSHITGMILQIDGPWNNNTTNNTFRPIGGDMKDIWRNELFNYKVVRVKPFSVAPTSIARPVIGTGTHREKRAVGLGMLFLGVLSAAGSTMGAAATALTVQTHSLIKGIVQQQDNLLRAIQAQQELLRLSVWGIRQLRARLLALETFIQNQQLLNLWGCKGRLICYTSVKWNXTWXXTTNIDQIWGNLTWQEWDQQIDNVSAXIYEEIQRAQVQQEQNEKKLLELDEWASLWNWLDITKWLWYIKIAIIIVGALIGVRIVMVVLNLVRNIRQGYQPLSLQIPTRHQXEAETPGRTGEGGGEEGRPRLIPSPQGFLPLLYTDLRTITLWSYHLLSNLISGIQTVISHLRSGLWILGQKIIDACRICAAVIHFWLQELQKSATSLLDTCAVAVANWTDGIILGXQRLGRGILNIPRRIRQGLERSLL

SEQ ID NO: 363 - protein, 868 aa, HIV
MKVMEKRNRKLGILCMVMALITPCLSHNQHYATVYAGVPVWEEATPVLFCASDVNLTSTEQHNIWASQACVPTDPSPYEYPLKNVTDNFNIWENYMVEQMQEDIISLWEQSLKPCVQMTFLCVQMNCTNVNDETNSSVKNDTSSSENLMKKCEFNVTTVLKDKKEKQQALFYVSDLMKVNENNDTMYTLINCNSTTIKQTCPKVSFEAIPIHYCAPAGYAIFKCNNTGFNGTGPCTNVTVVTCTHGIRPTVSTQLILNGTISEGKIRIMGKNISDTGKNIIVTINSTINMTCERPGNQTVQKILTGPVAWYSMGLKNNLTNSRAASCKYNSSVWEEALKQTAERYLELMNNTNTVNITFNHSTGGDPEVTHLHFNCHGEFFYCNTSQMFNYTFSCTRTNCIRQSNSSINGTISCRIKQVVRSWIQGGSGLYAPPRPGYLTCNSSITGMILQLDKTWNRTNNSESTFRPIGGDMKDIWRTELFKYKVVKIKPFSVAPTKIARPVIGTGTRREKRAVGLGMLFLGVLSAAGSTMGAAATTLAVQTHTLMKGIVQQQDNLLRAIQAQQQLLRLSVWGIRQLRARLLALETLIQNQQLLNLWGCKGRLVCYTSVKWNRTWTNNNTDLDTIWGNLTWQEWDQQISNISATIYDEIQKAQVQQEHNEKKLLELDEWASIWNWLDITKWLWYIKIAIIIVGALIGVRIVMIVLNLVRNIRHGYQPLSFQTPTHHQQPEAQAPGGTGEGGGERDRLRSIPSPQGFLPLLYTDLRTIILWSYHLLSNLASGIQTVISHLGLGLWILGQKIISACRICIAVIQYWLQELQNSATSLLDTLAVAVANWTDGIILGLQRIGRGILNIPRRIRQGLERALL

SEQ ID NO: 364 - protein, 858 aa, HIV
  misc_feature (99)..(99): Xaa can be any naturally occurring amino acid
  misc_feature (482)..(482): Xaa can be any naturally occurring amino acid
  misc_feature (538)..(538): Xaa can be any naturally occurring amino acid
MRKPIHIIWGLALLIQFIEKGTNEDYVTVFYGVPVWRNATPTLFCATNASMTSTEVHNVWATTSCVPIDPDPIVVRLNTSVWFNAYKNYMVESMTEDMXQLFQQSHKPCVKLTPMCIKMNCTGYNGTPTTPSTTTSTVTPKTTTPIVDGMKLQECNFNQSTGFKDKKQKMKAIFYKGDLMKCQDNNETNCYYLWHCNTTTITQSCEKSTFEPIPIHYCAPAGYAILRCEDEDFTGVGMCKNVSVVHCTHGISPMVATWLLLNGTYQTNTSVVMNGRKNESVLVRFGKEFENLTITCIRPGNRTVRNLQIGPGMTFYNVEIATGDTRKAFCTVNKTLWEQARNKTEHVLAEHWKKVDNKTNAKTIWTFQDGDPEVKVHWFNCQGEFFYCDITPWFNATYTGNLITNGALIAHCRIKQIVNHWGIVSKGIYLAPRRGNVSCTSSITGIMLEGQIYNETVKVSPAARVADQWRAELSRYQVVEIXPLSVAPTTGKRPEIKQHSRQKRGIGIGLFFLGLLSAAGSTMGAASIALTAQTRNLXHGIVQQQANLLQAIETQQHLLQLSVWGVKQLQARMLAVEKYLRDQQLLSLWGCADKVTCHTTVPWNNSWVNFTQTCAKNSSDIQCIWENMTWQEWDRLVQNSTGQIYNILQIAHEQQERNKKELYELDKWSSLWNWFDITQWLWYIKIFIMIVGAIVGLRILLVLVSCLRKVRQGYHPLSFQIPTQNQQDPEQPEEIREEGGRKDRIRWRALQHGFFALLWVDLTSIIQWIYQICRTCLLNLWAVLQHLCRITFRLCNHLENNLSTLWTIIRTEIIKNIDRLAIWVGEKTDSILLALQTIVRIIREVPRRIRQGLEIALN

SEQ ID NO: 365 - protein, 855 aa, HIV
MKVMGMKYYWWRNSCRSISIKLILIGWIASCFGEENWWVTVYYGVPVWREAKTTLFCASDAKSYSTEAHNIWATQACVPTDPTPQEVLLPNVTEEFNMWENYMVDQMQEDIISLWEQSLKPCVKLTPLCVTLTCNNPTNTSCTNSTDDRLGDMRNCSFNVTTELRDKKRQVYSLFYVEDITAIGNNSTYRLINCNTTAITQACPKTSFEPIPIHYCAPAGFALLKCNDIDYKGNETCKNVSTVHCTHGIKPVATTQLILNGSTADNQTVARIDPSENLAIIQLKDPVKITCRRPGNNTRGQIQIGPAMTFYNIENVVGDTRKAYCEINGTQWAKALNETKEVLRNILRKNISFMVPSGGDPEVTNHHFNCGGEFFYCNTSEIINITKINKTENMTIIPCRIRQIVNSWMRVGKGIFAPPIRGNITCTSNITGMLLEIHKNREDQGEDQDQNNTYVCLTGGNMKDIWRSELYKYKIVEIQPLGVAPTKSRRYAVEKQHHREKRALGLGALFLGFLGAAGSTMGAASVVLTVQARQLLTGIVQQQNNLLRAIEAQQHLLQLSVWGIKQLQARVLAVERYLRDQQLLGLWGCTGKTICPTAVRWNKTWGNISDYQVIWNNYTWQQWDREVNNYTGLIYTLLEEANTQQEKNEKELLELDSWANLWSWFDITNWLWYIKMFLIVVGGIIGLRICFAIGSLINRVRKGYSPLSLQTLIPANQGPDGLGETEKGGGENVRGRSIRLVSGFLPLVWEDLRNLLSFLYHQLRDCASLIWRLLEILGQYSLRGVQQIGTLLHQLRGTLQYWTTEIKNSAISLLDTTAIAVGEGTDRILEAITRLGRGILHIPRRIRQGLERALL

SEQ ID NO: 366 - protein, 836 aa, HIV
MKVMEKKKRLWLSYCLLSSLIIPGLSSLWATVYYGVPVWRDVETTLFCASDAKAYKQEAHNIWATQACVPTDPNPQEVHLPNVTEKFDMWENNMAEQMQEDIISLWDQSLKPCIKLTPLCVTMTCLNPDSNSSAVNTTDIMRNCSFNITTELRDKKKQVYSLFYVDDLAHINNNTYRLINCNTTAITQACPKTSFEPIPIHYCAPPGFAILKCNEKDFKGKGECKNVSTVQCTHGIKPVVTTQLIINGSLATKNVTVRSKNFADIILVQFSEGVNMTCIRPGNNTVGNVQLGPGMTFYNIPKIVGDVREAHCNISKLTWEKQRKYTLEIIKKEANLTKVELIPNAGGDPEVVNMMLNCGGEFFYCNTIPLFNMTYNNTDNTTITLKCRIRQIVNQWMRVGKGIFAPPIKGVLSCNSNITGMILDISISAVNNDSRNITVMPTGGDMTALWKNELHKYKVVSIEPIGVAPGKAKRHTVKREKRAAFGLGALFLGFLGAAGSTMGAASVVLTVQARQLLSGIVQQQNNLLRAIEAQQHLLQLSVWGIKQLQARVLAVERYLKDQQILGLWGCSGKTICYTTVPWNDTWSNNLSYDAIWGNLTWQEWDRKVRNYSGTIFSLIEQAQEQQNTNEKSLLELDQWSSLWNWFDITNWLWYIKIFLIVVASLVGIRIVGVIFSLVAKVRQGYSPLSLQTLFPTTREPDRPEGTEEGAGKTDNVRSTRLVSGFLALVWEDLRNLLIFLYHRLEDLLLILRRTVQILGQNINKGLQLLNELRARCWGVIAYWARELKVSATSLLDTTAIAVAEGTDRIIELTRRLFLGIIHIPRRIRQGLERSLL

SEQ ID NO: 367 - protein, 29 aa, HIV
  MISC_FEATURE (2)..(5): X2:  Q, R X3:  A, T X4:  R X5:  V, I, L
  MISC_FEATURE (6)..(9): X6:  L X7:  A X8:  V, I, L, M X9:  E
  MISC_FEATURE (7)..(13): X10: R, S, T, K, G X11: Y, L, F X12: L, I, V X13: K, Q, R, G, S
  MISC_FEATURE (14)..(17): X14: D, N X15: Q X16: Q, K, R X17: L, I, F
  misc_feature (18)..(21): Xaa can be any naturally occurring amino acid
  misc_feature (24)..(28): Xaa can be any naturally occurring amino acid
LXXXXXXXXXXXXXXXXXXXXGCXXXXXC

SEQ ID NO: 368 - protein, 29 aa, HIV
  MISC_FEATURE (2)..(5): X2:  Q, R X3:  A, T X4:  R X5:  V, I, L
  MISC_FEATURE (6)..(9): X6:  L X7:  A X8:  V, I, L, M X9:  E
  MISC_FEATURE (10)..(13): X10: R, S, T, K X11: Y, L, F X12: L, I X13: K, Q, R, G
  MISC_FEATURE (14)..(17): X14: D, N X15: Q X16: Q, K, R X17: L, F
  misc_feature (18)..(21): Xaa can be any naturally occurring amino acid
  misc_feature (24)..(28): Xaa can be any naturally occurring amino acid
LXXXXXXXXXXXXXXXXXXXXGCXXXXXC

SEQ ID NO: 369 - protein, 23 aa, HIV
LQARVLAVERYLKDQQLLGIWGC

1.-75. (canceled)

76. A method for making an HIV-1 envelope glycoprotein, said method comprising the steps of:
selecting at least one HIV envelope glycoprotein from the group consisting of GP41 and GP160; and
modifying the immunosuppressive domain of said envelope glycoprotein, said immunosuppressive domain being localizable by the sequence:
LX₂X₃X₄X₅X₆X₇X₈X₉X₁₀X₁₁X₁₂X₁₃X₁₄X₁₅X₁₆X₁₇X₁₈X₁₉X₂₀X₂₁GCX₂₄X₂₅X₂₆X₂₇X₂₈C
(SEQ ID NO:1), wherein X₂-X₂₁ and X₂₄-X₂₈ are independently any amino acid residue; said modifying step comprising mutating or genetically modifying at least one amino acid selected from the group consisting of amino acids X₂-X₁₇, wherein said amino acids after said modifying step are selected from the following respective groups:
X₂: Q, R, N, A, G
X₃: A, T, V, G, Q, R
X₄: R, K, G, A, Q
X₅: V, I, L, M, A, G, Q, R
X₆: L, A, C, D, E, F, G, H, I, K, M, N, P, Q, R, S, T, V, W, Y
X₇: A, T, S, G, Q, R
X₈: V, I, L, Q, M, A, G, Q, R
X₉: E, K, A, G, Q, R
X₁₀: R, S, T, K, G, N, E, D, A, G, Q
X₁₁: L, A, C, D, E, F, G, H, I, K, M, N, P, Q, R, S, T, V, W, Y
X₁₂: L, V, I, M, R, A, G, Q
X₁₃: K, Q, R, A, E, G, S, H, W, T, V
X₁₄: D, E, N, H, G, A, G, Q, R
X₁₅: Q, R, A, G
X₁₆: Q, A, S, K, T, R, H, G
X₁₇: L, M, S, Q, R, H, I, V, F, A, G;
wherein said glycoprotein is capable of being expressed on the surface of a cell, virus, or virus-like particle and provides reduced immune suppression, allowing said HIV-1 envelope glycoprotein to generate an enhanced immune response as compared to the corresponding wild-type HIV-1 envelope glycoprotein.

77. The method according to claim 76, further comprising using said HIV-1 envelope glycoprotein for the production of a vaccine.

78. The method according to claim 76, further comprising using said HIV-1 envelope glycoprotein is for the generation of neutralizing antibodies.

79. The method according to claim 76, wherein said modifying step does not provide a wild type sequence having immune suppressing properties.

80. The method according to claim 76, wherein said modifying step does not provide a sequence comprising any of the following amino acids:
X₂: Q, R
X₃: A, T
X₄: R
X₅: V, I, L
X₆: L
X₇: A
X₈: V, I, L, M
X₉: E
X₁₀: R, S, T, K, G
X₁₁: Y, L, F
X₁₂: L, I, V
X₁₃: K, Q, R, G, S
X₁₄: D, N
X₁₅: Q
X₁₆: Q, K, R
X₁₇: L, I, F.

81. The method according to claim 76, wherein the HIV-1 envelope glycoprotein exhibits fusogenic activity provided by said sequence.

82. The method according to claim 76, wherein the first 17 amino acids of said sequence are modified to LQARX₅X₆AVERX₁₁LKDQQL, and wherein X₆ and X₁₁ are independently any amino acids, and X₅ is selected from V, I, L, M, A, G, Q, and R.

83. The method according to claim 76, wherein the first 17 amino acids of said sequence are modified to LQARX₅X₆AVERX₁₁LKDQQL, and further harbor 1 or 2 or 3 point mutations represented by any amino acids.

84. The method according to claim 76, wherein the first 17 amino acids of said sequence are modified to LQARX₅X₆AVERX₁₁LKDQQL, and further harbors 1 or 2 point mutations selected from any of the following amino acids:
X₂: R, N, A, G
X₃: T, V, G, Q, R
X₄: K, G, A, Q
X₅: V, L, M, A, G, Q, R
X₇: T, S, G, Q, R
X₈: I, L, Q, M, A, G, Q, R
X₉: K, A, G, Q, R
X₁₀: S, T, K, G, N, E, D, A, A, G, Q
X₁₂: V, I, M, R, A, G, Q
X₁₃: Q, R, A, E, G, S, H, W, T, V
X₁₄: E, N, H, G, A, G, Q, R
X₁₅: R, A, G
X₁₆: A, S, K, T, R, H, G
X₁₇: M, S, Q, R, H, I, V, F, A.

85. The method according to claim 76, wherein the first 17 amino acids of said sequence are modified to a sequence selected from the group consisting of:
LQARX₅X₆AVERX₁₁LKDQQL,
LQARIX₆AVERX₁₁LKDQQL, and
LQARVX₆AVERX₁₁LKDQQL.

86. The method according to claim 76, wherein the first 17 amino acids of said sequence are modified to LQARILAVERGLKDQQL or LQARIQAVERYLKDQQL.

87. The method according to claim 76, wherein the first 17 amino acids furthermore harbor 1, 2, or 3 point mutations in said modified sequence.

88. The method according to claim 76, wherein the reduced immune suppression is measured by a technique selected from the group consisting of CTLL2 and PBMC proliferation inhibition assays.

89. The method according to claim 76, wherein the immune suppression after the modifying step is at least 25% reduced compared to before the modifying step.

90. An antigen comprising the amino acid sequence:
LX₂X₃X₄X₅X₆X₇X₈X₉X₁₀X₁₁X₁₂X₁₃X₁₄X₁₅X₁₆X₁₇
wherein X₂-X₁₇ are independently selected from the following amino acids:
X₂: Q, R, N, A, G
X₃: A, T, V, G, Q, R
X₄: R, K, G, A, Q
X₅: V, I, L, M, A, G, Q, R
X₆: L, A, C, D, E, F, G, H, I, K, M, N, P, Q, R, S, T, V, W, Y
X₇: A, T, S, G, Q, R
X₈: V, I, L, Q, M, A, G, Q, R
X₉: E, K, A, G, Q, R
X₁₀: R, S, T, K, G, N, E, D, A, A, G, Q
X₁₁: L, A, C, D, E, F, G, H, I, K, M, N, P, Q, R, S, T, V, W, Y
X₁₂: L, V, I, M, R, A, G, Q
X₁₃: K, Q, R, A, E, G, S, H, W, T, V
X₁₄: D, E, N, H, G, A, G, Q, R
X₁₅: Q, R, A, G
X₁₆: Q, A, S, K, T, R, H, G
X₁₇: L, M, S, Q, R, H, I, V, F, A
subject to the proviso that said sequence provides the ability of said antigen to be expressed on the surface of a cell, virus, or virus-like particle, and said antigen is capable of generating an immune response.

91. The antigen according to claim 90, wherein said antigen is obtainable using a method comprising modifying a wild-type antigen to include a sequence selected from the group consisting of SEQ ID NOS:1 to 228.

92. The antigen according to claim 90, wherein said antigen is obtainable using a method comprising modifying a wild-type antigen to include a sequence selected from the group consisting of SEQ ID NOS:1 to 228, wherein said sequence is modified to comprise 1, 2, 3, 4, or 5 point mutations.

93. The antigen according to claim 90, wherein said antigen mediates binding of a virus to a cell expressing CD4.

94. The antigen according to claim 90, which invokes an immune response which causes generation of neutralizing antibodies against HIV.

95. The antigen according to claim 90, comprising a sequence of an HIV glycoprotein selected from the group consisting of SEQ ID NOS:229 to 366, or comprising a sequence which is at least 70 percent identical to a sequence selected from the group consisting of SEQ ID NOS:229 to 366.

96. The antigen according to claim 90, which is recombinant or obtained by recombinant technology.

97. A vaccine composition for HIV comprising an HIV-1 envelope glycoprotein obtainable according to the method of claim 1.

98. The vaccine composition for HIV according to claim 97, further comprising a virus like particle (VLP), wherein the virus like particle is obtained using an expression vector for a retroviral gag protein, and optionally using an expression vector for a retroviral pol protein.
